United States Patent Application Publication US 2003/0143668 A1 - sequence listing, part 2

SEQ ID NO: 1689 - DNA, 1474 bp, Homo sapiens
  source (1)..(1474)
  CDS (201)..(1274)
acatgcttgtaatcccagctactcagaaggccgaggccagagaatcacttgaacccaggaggcagaggttgcagtgagccaagcttgcaccactgcactccagcctgggtgacaaagagagactctgtctcaaaaataaaataaaataaagatttaatctatatttgtagtttagaaactaatgattccagatcatagagatgttgaaattggttattattgagaacatggcagaaattatgctattctcattagatctcttgcttttctccacagatatcctttgctttaattttccttctaagatgatcaaacttcctggttttattaccatacaaatcttcttttatccacaagccagctttggaatttcagcaaacaccatccttcttctttaccacatcttcacctttgttttcagtcacaggtctaagtccattgacatgataattagtcacctgtctctcatccacatactgctgctcttcactcaggcaatattggtgtccttagacttctttggttcacagaatactcaggatgatcttaggtataaggtcattgtctttttaaacaaggtgatgaggggcctctccatctgcaccccctgcctcctgagtgtgctccaggccatcatcagccccagcatcttctccttggcaaagctcaaacatccttctgcaagtcacatcttaggattcttccttttctcatgggtcctcaacatgttcattggtgtaatcttctgctgtacactgcggctacccccagtgaaacggggccagtcttctgtttgtcatacagcactgttcctttttgcccatgagctacacccacaggagactgtttttcacactaatgactttgagggatgtcacctttatagggttcatggtcctctcaagaggctacatggtgattattttatacagacaataagaggctatctcagtgccttcacacagccagcctgtccccgagtctcaccagtgaaaagagcctcccaggctatcttactgctggtgagttttgtcttcacatactgggtggactttacgttctcattttcaggaggtgtgacatggataaatgattctctgctagtgtggctccaggttattgtggccaatagctatgccgcaattagtcctttgatgctaatttatgctgataaccaaatattcaagactctgcaaatgttatggtttaaatatttgtctcctccaaagctcatgttgaaatttaatcgccaatgtggcagtactaagaagtgatgagaggttaatccattcatgaactcatgaattaatgggttgtcatgagaatgggactggtggctttagaagacgaggaagagagaccactcagcctccttgccatatgatgccgtctgctgcctcaggacactacagaattcccaccagcaagaaggctctgatcatctggtgagatattggaccttccataactgtaa

SEQ ID NO: 1690 - protein, 357 aa, Homo sapiens [sequence omitted]

SEQ ID NO: 1691 - DNA, 940 bp, Homo sapiens
  source (1)..(940)
  CDS (201)..(740)
attttccttccttacattgattttagaaaacttgtctcaactatagaccgggctgggggagctggtatccttcatgagcttatattacctatctaggaaccaaccacattcacccttttgagaatttgcattaacacccatgaagaaaattcaaactagagccatgagtggcaggtcactacaataaacatcaggtaacaatgatatcaagtaattataatatgctaactctagccacgcaccgttccattgccctcattttagaaacaagaaaatggagatacagaagtttcaataacttccccaaagtcagaaaactgaaaaagaaaataaaaggggctatacctggatttgaatgccagcgttgtttctcagagcgcgatcttaacagaggcactagacgccgccatgggggagattctgtgcttgcatctgacccattcccccactcccgaggctgcttcccttcgctccccccactcccgaggctgcttcccttcgctccccccactcccgaggctgcttcccttcgctccccccactcccgaggctgcttcccttcgctcccccgactcccgaggctgcttcccttcgcttcccccactcccgaggctgcttcccttcgctcccccgactcccgaggctgcttcccttcgctccccccactcccgaggctgattcccttcgctccccccactcccgaggctgattcccttcgcttcccccactcccgaggctgattcccttcgctccccccactcctgaggctgattcccttcgcttccccgactcctgacgctgcttcccttcgcttcccccactcctgaggctgcttcccttcgcttcccccactcctgaggctgcttccctttgcatgggattctggaggcctctgagaaatgcctttgggcgtgtaatgtaattgaattgatcctttgta

SEQ ID NO: 1692 - protein, 179 aa, Homo sapiens
MISSNYNMLTLATHRSIALILETRKWRYRSFNNFPKVRKLKKKIKGAIPGFECQRCFSERDLNRGTRRRHGGDSVLASDPFPHSRGCFPSLPPLPRLLPFAPPTPEAASLRSPHSRGCFPSLPRLPRLLPFASPTPEAASLRSPDSRGCFPSLPPLPRLIPFAPPTPEADSLRFPHSRG

SEQ ID NO: 1693 - DNA, 904 bp, Homo sapiens
  source (1)..(904)
  CDS (201)..(704)
gaacaccaagcatgttggattcagagcatgaggttttcttgaagccagtgtggagagcacagaaaaaatgagggaggagacattctcagcagtcaggaagagaaaggctgccccaatagaggagaaggaaagagaaaggagaaccagtgaatagtggacacacctcctgggattagaaacagccagatgagggtggagaaatgccaggcctcactgctcatccttgctgctcaggcacggaccagggcattgcaagccctgttggagacactccatgttctatgtggcatgacttgggcagaaggttaaatatgatcacagaagatacccaggtgagtggaccaggggctgcttatggagccacatgcttttatgacataagcacctgggcagcccaagagaacttgcagaacacaacatacgaaaggtgggctctcataaccaaatcctgtggcagggatcacagacttcagtggcaggtgatagcacagtatccaaagtacccagatggcaccagctgctctctggagcacctaatactggaatcgcaggggccaggggaagccagtgatcctgaacggaaaccagcaaaaaggcagaggacagtagagagaccaccttcccccagtgccaggagggcaggtgggcttccttctaccaagacacattccaggaagagaaaacgggagcaggaaatacagtgaaaaacttaacacccaaagcagactgagctcaccccaaagagcccgctctaatccaggagagtctgagccacctctaacagggagggtgtaggttttatccgtctctgccatcagtggactgcagccttcctaagccagaaaaggacatttgaagaaagctacattttctttacacatctcgatttggtttggatgtgtgt

SEQ ID NO: 1694 - protein, 167 aa, Homo sapiens [sequence omitted]

SEQ ID NO: 1695 - DNA, 871 bp, Homo sapiens
  source (1)..(871)
  CDS (201)..(671)
ttccccagtcgcatcctctagggtccatctggaatgccgccaacttctcaagggtgtccgagtgctctgagcagatgtgggcccttccgtgttctgtttcttcgtgtgtgcgtctatttgctggaggcttcttgaggccaggagtctttccttctctctcctggcctggaatgtaggtgggccccaaatgtttacccggaatgagagcaggggcatggccccaaaagcaaacctcctacttaggagttttgctaagagacttgctgcctccatggcatatgagatttggggatcctttgaccgtggggtccaggagcactagcctgagagtggggcctgtctggggcattcaccccagtgcccccgtgcctagagccgtgcatggtatgaggcaggggcctctccatgttgggtggatggagccattcgacagacgttaccgagtgcccgtgatgtgtcgcgcagtcactgtttccagcgctgaagacccaacagtgaaggagacgaggcaggatatgcgattgggccccgctctcggatcctgtgtccaccaagcacgccgctggggagcgagtgagcctccacgtcactacggggttttgtccgggttgcctgccgtgctgttgacgctggacaggagcggagccgttttaggtctcttgaggctgtgacagtgaggctgagacaggctgatgggaaggaaatcatgaagaggggagacgagctcccaggcaggtcacagctctgcggaggccctgaggtgtggcgagtctagcgccttccagaactgagagaagctggcatcctgaaggaggcctcagacagggccaaagaggcagctaatatgctaggtggggcggggaggctgtcg

SEQ ID NO: 1696 - protein, 156 aa, Homo sapiens [sequence omitted]

SEQ ID NO: 1697 - DNA, 1063 bp, Homo sapiens
  source (1)..(1063)
  CDS (201)..(863)
cctcccactgtccagggagaaggtgcctttaaagtgagggctcccttctccactccctggccagtgagtaaaacctgactaccttttccaattggatattctttctttgcagccgacacaaagtgggaaaagaactcggttctccagtgacagatccacaagaacccaaagagagaggttacctggtagcaggtgaggggatggggaaaggagacctcactctcaactttttatatgtatatattttatatatatataacacacatataaatatactatatataaaatatataatacatatatattatatatatatatatatatatatatattttttttttttgaggcagggtctcaccgtcgcccaggctggagtgcagtggtgcaatcatggctcactgcagcctaaaactcctgggctcagcaatcctcccacctcagcctcccaagtagctatgaccacaggggcgcaccgccatacccagttaatgtttgtattttttgtagagatggggtctcactatgttgcccacgatggtctcaaactcctggccttaagcaatctgcccacctcagcctctcaaagtgttgggattacaggtgtgagccactgcacccggcacttttttatacttttggattctgaatcatgtgagtgtattgccattaccagcaaattttgggaaaagcccactgcaaggatgagtgaagggccccgcagcaggttcctcctcacagcctccactcagggccaacagcttccacacagacgcatggacatgtggactgtggacgtggagcgaatgtggtggctgtctactttgttctcaggatacttctggacagaaaatcccagcatatgactaattagattcagttgaaaaataacctaaaagccaatcttcagcaacgaaatgaagttcctgactggttgttctcagtaaactaaaaataaaatcctgagcccccagtggactgaagggacctcctcttggcctagaggactccagagcagccttgaaaactgagttcctctccctcttctggatagtctacggagggc

SEQ ID NO: 1698 - protein, 220 aa, Homo sapiens
MGKGDLTLNFLYVYILYIYNTHINILYIKYIIHIYYIYIYIYIYFFFLRQGLTVAQAGVQWCNHGSLQPKTPGLSNPPTSASQVAMTTGAHRHTQLMFVFFVEMGSHYVAHDGLKLLALSNLPTSASQSVGITGVSHCTRHFFILLDSESCECIAITSKFWEKPTARMSEGPRSRFLLTASTQGQQLPHRRMDMWTVDVERMWWLSTLFSGYFWTENPSI

SEQ ID NO: 1699 - DNA, 973 bp, Homo sapiens
  source (1)..(973)
  CDS (201)..(773)
gacaaatgggatctaattaaacttaagagtttttgcacagcaaaataaactatcaacagagtaaacagacaatctacagaatgggagaaaatattttcaaactatgcatctgacaaaggtctaatatccagcatctataaggaacttaaacgaatttacaagagaaaaacaactaccccattaaaaagtgggcaaaggacatgaacacttttctttccctttttttttcttttttttttttgagactgagtttccctcttgtcacccaggctgtagtgcagtggcacactctcggctcaccgcaacttctgcctcttgggttcaatcgattctcctgtctcagcctcccaagtagccgagattacaggcatgtgccaccatgcctggctaattttgcatttttagtagagacgaggtttctccatgttggtcaggctggtctcgaactcccgacctcaagtgattcacccacctcagcctcccaaagtgcttggattacaggcatgagccaccacgcccggctgaacagacactttccaaaagaaggcatatatgcagccaacggacatatgaaaaaaagctcaatatcaccgatcattagagaaatgcaaatcaaaaccacaatgagataccatctcacaccagtcagaatggccattattaaaaagtcagctctttcccatcttacaagatggagggtgaacaagttgagaagccagatactaaagagaagaaacctgaagtcaagaaggctgatgctggtggcaaggtgaaaaagggtaacctcaaggctaagaagcccaagaacaggaagccccattgcagtcaaaatcctgtcattgtcagagggattggcagatattctccatctgctatgtattccagaaaggccacgtgcaagaggaagtactcagctgtgaaatccaaggttgaaaagcaaaaggagaagtttcctgcaactattacaaaacca

SEQ ID NO: 1700 - protein, 190 aa, Homo sapiens [sequence omitted]

SEQ ID NO: 1701 - DNA, 919 bp, Homo sapiens
  source (1)..(919)
  CDS (201)..(719)
gtttccactaccctctccatgctctcagttaaatgacttctcagggtgaaagctccttaagccagtcctggggattcacatagaggacttgactggcctccaaaaatttgcttcttaaggtttcagggattcaatagctagagattcatcctaacaacacaaaagttgatttccttgtagtttattttcataaatatattatgtatactaagtttatattagcaaataatgtgataattttaaaaacatgtttatacaaacatagccctttctttttctttttctttctttctttcttttctttctttctttctttctttctttctttctttctttctttctttctttcttttctttctttttctttctttttctttttctttctttccttccttccttccttccttcctttctctttctttctttcttcctttctttctttctttctctttctctctctcttcctttcttcttttcttctttctttctttttttttttgagtcggagtctcgcactgtcccctgggctggagtgcaatggcacaatcccagctcactgcaacctccgcctcccaggttcaagtgattctcctgcctcagcctcctgggtaggtgggattacaggcacccaccgtcacgcctggctaatttttgtatttttagtagagacggggtttcactatgttagccaggctggtctcgagctcctgaccgcgtgatctacccgccttggtctcccaaaatgctgggattacaggcatgagccaccacgcccggcctctttctttttttttcttttttacatgtactggtttattataaaggatattgcgaaggatacagaagaaggagtgacatgtagcgtgaggtatgggggaaggggcagggagttttcacgtcctccctggatgtgccgccc

SEQ ID NO: 1702 - protein, 172 aa, Homo sapiens
MYTKFILANNVIILKTCLYKHSPFFFFFFLSFFSFFLSFFLSFFLSFFLSFLSFSFFFFFFLSFLPSFLPFSFFLSSFLSFFLFLSLFLSSFLLSFFFFLSRSLALSPGLECNGTIPAHCNLRLPGSSDSPASASWVGGITGTHRHAWLIFVFLVETGFHYVSQAGLELLTA

SEQ ID NO: 1703 - DNA, 1069 bp, Homo sapiens
  source (1)..(1069)
  CDS (201)..(869)
tccagagacttgttgaatggctttgacccaaatgcagatagtgatatgaacaatgaagtccaggctgaggtggtctcagatggaaataaggaacttgttagatactgtagtaaaagtcactcttgctgtgcaaagagactggtggcattttgccccagccctaaagatctgtggaatttttaacttgagaaagataatttatggtagaaaaaatttctaagcagcaaagcattgaagaggaagcagaacatacaaatttggaaaatttgcagactgtcaatgtgataaaaaagaaaaccccattttctagagagaaattcaagccagctgcagaaatttacataagtaatgaggaaccagatgttaatcaccaagacaatggggaaaatgtctccaaggcatgttatggtggctcttcccatcacaagcctggaggcctaagagagaaaggtttcatgggctgggcccaggcttccccttctgtatgcagccttgggacaaggttccctctatcccagctgcttcagctccaaccatggctaaaaggggccaatgtgcagctcaggctgttgcttcagagggtgcaagccccaagccttggtggtttacatgtggtattgggcctgtgtgtgcacagaagtcaagaactgaggtttgggaacccctacctggatttcagaggatgtatggaaacacctggatatccaggcagaagtttgctgcaggggcggtaccctcatggggaaacactgctgggacactgtggaaggaaaatgtggggtcagagccccacacagagttcccactggagcactacctgttggacctgtaagaagatggtcaccatcctccagaccccagaatggtagatccaccaacagcttttactgtgcacctgggaaaactgcaggcactcatgccagcccatgaaaacaggctgaagtggggctgtaccctgcaaagccacaagagcagagctacccaaggctctgggagcccacctcttacattagtgtcccctggatgtgaaacatgcagtcaaaggtgatcattttggaactttctggtt

SEQ ID NO: 1704 - protein, 222 aa, Homo sapiens [sequence omitted]

SEQ ID NO: 1705 - DNA, 916 bp, Homo sapiens
  source (1)..(916)
  CDS (201)..(716)
atgatctcatcttagaatccttaatttaatcacacttgcaaagactctttttcccaataaggtcacagtaattggttctgaggatgaggacctggacatatcatttgggagccactgttcagcccactacagcctggtagaagttccgccccttcccacctcctttctcccccttgtgcgctccagccaaagtagtctccatgcagttccctaaacaataccacctcagggtgccttcagataaacccatagcccatgtccttatttctttcgagtatttgctcctatatcacctgtccagtgaggacttcttagccaccctactgaactccatggaacacccgattgcaactcctcttcctttcctgctttatttttctccacagcatctactgcctttaacatctatcattttacttattgctttttatttatgtctttttttgagacagggtctcactctgtcacccaggctggagcgcagtggcgcggatctcggctcactgcagcctcgacatcccgggctcaagcgattttctcacctcagcctcctaagtagctgggatttaggagtagtaggtgcacaccgccatgcttggctagtttttgtacttttttgtagagacagagtctttccatgttgcccaggatggtctcaaactcctgagctcaagctatctgcccacctcagcttcccaaagtgctgggacttataagcgtgaaccattgtgctcagcccattttacttatgtgtttatcattgcccaccaaaaatgaacctccatgcaggcagggactttgttttgttcattggtctattatcccctgcgtctaaaattgtgcctaatacagtaggtgctcaaaatccacttgctgactacacgagtaaatgggcaaagcactgtgctatgctggg

SEQ ID NO: 1706 - protein, 171 aa, Homo sapiens [sequence omitted]

SEQ ID NO: 1707 - DNA, 961 bp, Homo sapiens
  source (1)..(961)
  CDS (201)..(761)
tctacctccatgctagcattgctggtgttagagaggaattaacttcctggtctgtgcccttctctagaagaatataagatgctcctcctcctcaccccttctcagcctcctcccaagtcttcctcttctgcaccacccccgagtccaaacccacctcttgccccagcattcaggctggaaaacactgatgtggactcagtatgataactgagatgggggacgccagacatgtgaggacgctgtcctccgagaggtgtccccggctgttagccagctgtgctgtggtgctgtgggtctgtcataccctcccttgcttctgttcacactgggaggcccactcctggctcacctctccctctcagggacccacgtgggagcctggatccctggactgtcctgggcataggtttcaggggcctcctttgttgtcatcagaacccagaggaattcttctcctaaaaaatacgtatggcataccaatctgtgcggggcagtgtcctaagcacttagactacatcagggaagaacacagaccacatccctgtcctcatgcggcttatgttttctggaggaaagtggagacacaagtccttggctttagggctcccccggctgggggctgtgcagtccggtcagggcgggaggggaaatgcaccgctgcatgtgaaccttaccagcccaggcggatgccccttccccttagcactaccctggcctcctgcatcccctcgcctcatgttcctcccaccttcaaagaatgaagagccccatgggcccagcccctgccctgggaaccaggcagccttccagacctcaggggctgaggcagactattagggcagggctgactttggtgacactgcccattccctctcaggccagctcaggtcacccgggcctctgacccaggcctgtcactttgagaggggcaaaactgagaggggcttttcctagagaaaga

SEQ ID NO: 1708 - protein, 186 aa, Homo sapiens [sequence omitted]

SEQ ID NO: 1709 - DNA, 994 bp, Homo sapiens
  source (1)..(994)
  CDS (201)..(794)
cttccagaggtaactggtgctgccaaaccctgagcctttgggggactttttttttctgatgcatttttctcaatcattcgtttattttccagctcctgaaatttcattgttattgtcccctctcctgttctcccatcctgtgggttcattccctcagacatttaaagaaatctcatcactgttattggagcacccaagggatgactttagcattgcagtggctgtgcgtgtccaagctgccatctttatgtggacgtcctctcttctcactgacttccccatcccagcatggcagctccatgcttccagttgctcaggtcaaaactctggtgccatccttgactcttctctttcttttatacctcacattcaatcgctcagcaaatgtagtgagctctaccttcaaaatctattcagaattcaccacttccactgtgaccactcaggaccaagcctccactgtctctcacctggacgtcgcaatagcctcctcactcactgacctccctctttctctctttgtatttagcacagcagcatgttctatctgtcatactctgtcactcctcttcctaaagctcccctgtggctcccgttttactctgaatgagagtccaaatcccagtgaagaccaaggcctgtgtgatccagctctaccaccttcccagacacactggccttctggccacctcattgcacacaggcaagattccccactctcctctttaaatgggacactcttcctccaggtatctttggggctcaattcctcgtctccttcaggacacttgtgatgcatccttgacccttccatctaaaagtaaagccttcctcactctggggcccccctaccttccttatcctagttcatttttctctgtagcaactatgggcattagacatatattttgttctctgtggtatcctcagcacctagaatagtgcttggcacgcacatagtaggtgctcaacaaatatgtgttgcctgcaggca

SEQ ID NO: 1710 - protein, 197 aa, Homo sapiens [sequence omitted]

SEQ ID NO: 1711 - DNA, 1554 bp, Homo sapiens
  source (1)..(1554)
  CDS (201)..(562)
  CDS (604)..(922)
  CDS (971)..(1354)
ttggaaatttccaagttatctaggactcctgcctcttcctcgcttcccacagtttgtcaccaaaaactctggagtccataccctcctctcagcagctgctggccaggttcggtcttcattccctctcacatggactctgcctctagtgtcccctcccagcaagggctgaagaagaggagactggggtgggagaaggtggaatgggggctgcctttgtcgctagcctccgcagtaacctttcttctgccacttcaaggtcagagatgaacagcagtgttggggacctgggtgttggcggctgcagcctctgggatgaccctgctcgcttcatcgtggtgcccgcggcctatgccttggcactgggcctggggctgccagccaacgtggcggccctggcaatgttcatccgcagcggcgggcgcctgggccaggccctgcttctctacctgttcaacctggctctggttgatgagttcttcacgctcacgctgcagctgtggctcacctactacctgggcctggcccggaggccgcctgccacgcggccggggccacctactacgtgtccacctatgcggcggtggtcttcgccgcgctcatcagcgtgtgccgctgcggcttcgtacgcggtcccgggcccagggcggctgcccgcctggcccggtgcctacggcgccccgcgcgcgctgcctgcgccttcgcctggctggcgggcctggcccctccctgcctggagcaccgctgggcaagctcggggctggcctccgccacggtggccttcgcggccgccttcctgctggtgctcgcggccaacgtgagcctggcgcgggcgctcaaggcgccctctggcccgggcccgggccctgcaaccgccggcgcgcaccggcgcgcggccaagaccatggtcctggggttcctgctggtcttcgccctcagtctggcgcccaaccacctgctgctggcgccctaggtggctgggggggaagacaacggagaccggtgtcgcgccgcctccacgctcgacatcctgcacaccctcagcctggcgctgctgagcctcaacagctgcctggacccactcatctgctgcttcttcgtgcgcctcttccaccaggactgctgctgggcactgagctgccgcctggtgaagggggcgcccagggcgcatggggcctccttggcctcctcttggagagtctcctggcctcccctcctgtctcacccccctgtcaccctcccagtggcatccagggtggagaaagctctttggaaagacctagattctaatcctgacgcaaccacatactacccctgtagctgtgaacctccgggctcatctgtaccaaggacatagaacattctttgtaacccgaatgttccctggatgttgccagcttttggatacaaataatataccactgtgttttttttaaacctcttgggataaaacccaaagtccttatcatggcctacaaggccctgtctgatttggctcccctttctctccctaacccaccacccctgcgtctccctgcaggcagtcaccttcttagg

SEQ ID NO: 1712 - protein, 354 aa, Homo sapiens
MGAAFVASLRSNLSSATSRSEMNSSVGDLGVGGCSLWDDPARFIVVPAAYALALGLGLPANVAALAMFIRSGGRLGQALLLYLFNLALVDEFFTLTLQLWLTYYLGLARRPPATRPGPPTTVCRCGFVRGPGPRAAARLARCLRRPARAACAFAWLAGLAPPCLEHRWASSGLASATVAFAAAFLLVLAANVSLARALKAPSGPGPGPATAGAHRRAAKTMVLGFLLVAGGEDNGDRCRAASTLDILHTLSLALLSLNSCLDPLICCFFVRLFHQDCCWALSCRLVKGAPRAHGASLASSWRVSWPPLLSHPPVTLPVASRVEKALWKDLDSNPDATTYYPCSCEPPGSSVPRT

SEQ ID NO: 1713 - DNA, 1444 bp, Homo sapiens
  source (1)..(1444)
  CDS (201)..(1244)
gtgaatgcaggaagccaggtgtgagtctgaattcacattggtttttttatctttattaagcagtcattcctaaggcctgcccgagcctggcatctctacagaggagtggtgccatcaggacccctgtggggcagatcaacactcaaggcaggtgcagaatcaacaacctgtgacaaagccagccatccctgccaggaagcatgggggatgagctggcaccttgccctgtgggcactacagcttggccggccctgatccagctcatcagcaagacaccctgcatgccccaagcagccagcaacacttccttgggcctgggggacctcagggtgcccagctccatgctgtactggcttttccttccctcaagcctgctggctgcagccacactggctgtcagccccctgctgctggtgaccatcctgcggaaccaacggctgcgacaggagccccactacctgctcccggctaacatcctgctctcagacctggcctacattctcctccacatgctcatctcctccagcagcctgggtggctgggagctgggccgcatggcctgtggcattctcactgatgctgtcttcgccgcctgcaccagcaccatcctgtccttcaccgccattgtgctgcacacctacctggcagtcatccatccactgcgctacctctccttcatgtcccatggggctgcctggaaggcagtggccctcatctggctggtggcctgctgcttccccacattccttatttggctcagcaagtggcaggatgcccagctggaggagcaaggagcttcatacatcctaccaccaagcatgggcacccagccgggatgtggcctcctggtcattgttacctacacctccattctgtgcgttctgttcctctgcacagctctcattgccaactgtttctggaggatctatgcagaggccaagacttcaggcatctgggggcagggctattcccgggccaggggcaccctgctgatccactcagtgctgatcacattgtacgtgagcacaggggtggtgttctccctggacatggtgctgaccaggtaccaccacattgactctgggactcacacatggctcctggcagctaacagtgaggtactcatgatgcttccccgtgccatgctcacatacctgtacctgctccgctaccggcagctgttgggcatggtccggggccacctcccatccaggaggcaccaggccatctttaccatttcctagagttcttgagtccacagtctggcaagctgaggttaaaaatcatatgttgaatgcagcagtgtccacttatgactaacttcttagaacagcacaatataatagtggaattgggcctttcagaagacctcaactgatgattttcaccattttgacagtttttaagtagagaaagctctcttatgacactgaaatcctacttg

SEQ ID NO: 1714 - protein, 347 aa, Homo sapiens
MGDELAPCPVGTTAWPALIQLISKTPCMPQAASNTSLGLGDLRVPSSMLYWLFLPSSLLAAATLAVSPLLLVTILRNQRLRQEPHYLLPANILLSDLAYILLHMLISSSSLGGWELGRMACGILTDAVFAACTSTILSFTAIVLHTYLAVIHPLRYLSFMSHGAAWKAVALIWLVACCFPTFLIWLSKWQDAQLEEQGASYILPPSMGTQPGCGLLVIVTYTSILCVLFLCTALIANCFWRIYAEAKTSGIWGQGYSRARGTLLIHSVLITLYVSTGVVFSLDMVLTRYHHIDSGTHTWLLAANSEVLMMLPRAMLTYLYLLRYRQLLGMVRGHLPSRRHQAIFTIS

SEQ ID NO: 1715 - DNA, 1393 bp, Homo sapiens
  source (1)..(1393)
  CDS (201)..(1193)
aaatgtttaattggcaattaattgaaaaattctgtgtatcagcgaacatgatacagcccacagcctgcgggtctgcgcccctggattaacatgctgccctgccaggaggacacgacctgcagccccatcctaactctggccaccccatcctgcaggcatgccggctgccgctccaggactcccctgtccccaggaccaagatgacgcccaacagcactggcgaggtgcccagccccattcccaagggggctttggggctctccctggccctggcaagcctcatcatcaccgcgaacctgctcctagccctgggcatcgcctgggaccgccgcctgcgcagcccacctgctggctgcttcttcctgagcctactgctggctgggctgctcacgggtctggcattgcccacattgccagggctgtggaaccagagtcgccggggttactggtcctgcctcctcgtctacttggctcccaacttctccttcctctccctgcttgccaacctcttgctggtgcacggggagcgctacatggcagtcctgaggccactccagccccctgggagcattcggctggccctgctcctcacctgggctggtcccctgctctttgccagtctgcccgctctggggtggaaccactggacccctggtgccaactgcagctcccaggctatcttcccagccccctacctgtacctcgaagtctatgggctcctgctgcccgccgtgggtgctgctgccttcctctctgtccgcgtgctggccactgcccaccgccagctgcaggacatctgccggctggagcgggcagtgtgccgcgatgagccctccgccctggcccgggcccttacctggaggcaggcaagggcacaggctggagccatgctgctcttcgggctgtgctgggggccctacgtggccacactgctcctctcagtcctggcctatgagcagcgcccgccactggggcctgggacactgttgtccctcctctccctaggaagtgccagtgcagcggcagtgcccgtagccatggggctgggcgatcagcgctacacagccccctggagggcagccgcccaaaggtgcctgcaggggctgtggggaagagcctcccgggacagtcccggccccagcattgcctaccacccaagcagccaaagcagtgtcgacctggacttgaactaaaggaagggcctctgctgactcctaccagagcatccgtccagctcagccatccagcctgtctctaccgggccccacttctctggatcagagaccctgcctctgtttgaccccgcactgactgaataaagctcctctggccgtttatgattatctcattccatatctcagggcgaggcaggaggaaatggctcaacacacca

SEQ ID NO: 1716 - protein, 330 aa, Homo sapiens
MTPNSTGEVPSPIPKGALGLSLALASLIITANLLLALGIAWDRRLRSPPAGCFFLSLLLAGLLTGLALPTLPGLWNQSRRGYWSCLLVYLAPNFSFLSLLANLLLVHGERYMAVLRPLQPPGSIRLALLLTWAGPLLFASLPALGWNHWTPGANCSSQAIFPAPYLYLEVYGLLLPAVGAAAFLSVRVLATAHRQLQDICRLERAVCRDEPSALARALTWRQARAQAGAMLLFGLCWGPYVATLLLSVLAYEQRPPLGPGTLLSLLSLGSASAAAVPVAMGLGDQRYTAPWRAAAQRCLQGLWGRASRDSPGPSIAYHPSSQSSVDLDLN

SEQ ID NO: 1717 - DNA, 949 bp, Homo sapiens
  source (1)..(949)
  CDS (201)..(749)
tagccttgtcatatagtttgaagtttggtagcatgcttcctccagctttgttctttctgcttagaaatgccttggctatttgggttcctttttggttccatatgaattttaaaatactttttctaattataggaaaaatgtattgatagtttaataggaataaaattgaatctataaatttggagagtatacccatttttatgatattgagtcttactatctatgaacatggaatgttttttgcatcatctctgatttctttgagcagtgttttgtggttttccttgtacagatctttcaccttcctggtcagctgtcttcttaggtattttattctttttgtggcaatcatgaatgggactgcattcctgatttggctctcagcttggctgttgtttgtgtacaggaatgctagtaatttttgcacattgattttatttcctgggactttgttgaagttgtttattagcttaagaagcttttgggctaaaactgttgggttttctagatataggaccatgttgtctgcaaacagggatagtttgacttactcttttcccgtttggatgccctttatttctttctctttcctaattcctctggctaggacttccaatgctattttgaataggagtggggagacagggcatccttgtcttgtgctggttttcaaggggaatgcttccaggtttttcccattcagtgttatgttggctgtgggttttcatagatggctcttattattttgaagtatgttcattcaatacttagtttattgagagtttttaacatgaagggatattaaattttatcaaaagccttttctgcgtcttttgagataatcatgtggtttttgtctttagttctgattatttggcaaatcacatttattgatttgtgtatgttgaaccaaccttgcatcccagtgataaagcctacctgattgagg

SEQ ID NO: 1718 - protein, 182 aa, Homo sapiens [sequence omitted]

SEQ ID NO: 1719 - DNA, 916 bp, Homo sapiens
  source (1)..(916)
  CDS (201)..(716)
ccttctgagtcttctaaaaaaagtaaattattctaggacaacaaaggcatatttgaaagggtgacatgcagaacatgaactgacatcactggacaaaacatttgagtctattctgctcttgcgtttaccacaacaataatttccaccatttagtgaccatttaccatgtgccagaaactgtgcctaagtgctttaagaggatgatgtcatttaatttaataagaactgagtttggtgctgctattatttcctttattcaagtggttaaactaaggcttgaagcaattaacttgcccaaagtttcccagctagattccagaatatatgaggccagatctctcactatcaacaaccaagttactatttctacgttgcctcgcctcccacttcaccccaggaacctactgtgcgccaggcattgtcctagagaagagctcgtttggtggcaggttttgaccatagatttccatggtctgcttgaaaaatttttgtccaatctgattgacacctccctcttcctctgcttcctttctttcttcttttttttttttgagacagagtcttgctctctgcccaggctggagtgcagtggtgcaatctcggctcactgcaagctccgcctcccgggttcacgccattctcctgcctcagcctcccgagtagctgggactacaggagcccaccgccacgcccggctaatttttttgtatttttagtagagatggggtttcaccgtgttagccaggatggtctcgatttcctgacctcgtgatcctcccgcctcggcctcccaaagtgctgggattacaggcgtgagccaccacgtccggcccctttctttcttctagaggaagaaagtcccaaatacctggtggttgccatatctcctagcctatgtggtcaacatttaattaca

SEQ ID NO: 1720 - protein, 171 aa, Homo sapiens
MMSFNLIRTEFGAAIISFIQVVKLRLEAINLPKVSQLDSRIYEARSLTINNQVTISTLPRLPLHPRNLLCARHCPREELVWWQVLTIDFHGLLEKFLSNLIDTSLFLCFLSFFFFFFETESCSLPRLECSGAISAHCKLRLPGSRHSPASASRVAGTTGAHRHARLIFLYF

SEQ ID NO: 1721 - DNA, 943 bp, Homo sapiens
  source (1)..(943)
  CDS (201)..(743)
agtatagctgtgtggcttgcaggtggaaccagactctgtttctgaagtggctaatacctccttttgatacatagaatgtctaaccaaccagaatatgataccaagaacttatattttatatatctactgctttctcacttgagccacagagaaatgttatgaggtagggaaggtgggtgtgaaccaattccattttacagatgaggaaactgaggttcacattaagtggatggttacattactgtttagtgtcagacctaacacttcaacccaggttttttacttcaaaccctgtccttccccaaccccacccacaaagttatactgtaaaacaaatgagtggtgctgacatattgagaaaacttaggactatttttctgctcatggtaaacagatcacatctaaaacagacacatatcgccagaggcggtttgcttggtaacatggtcattgttattcctcagtaccacaacctcaatgtgacaatggaaaggtgctttcttgtaccttcagttctgactttgatgcctcctcccttttcagtgagctctgcccatctctgtgacaacttcacagaattcagctgcaaaacaaattaccgctgcatcccaaagtgggccgtgtgcaatggtgtagatgactgcagggacaacagtgatgagcaaggctgtggtaggaggggccacaggggagtggagggagggacaagaaagtgcacatgtcaagtgccatttattagatgagagatgagagtgtatttcccatgtcatcttttctttgtttacctctgtaaaaaaatggttgattcttctaataacatgttacatttttgtagcattttgcagggttaccaggggtatttaatttgtagcactttaagtcatgctgtcattgaggaagacgttattaagatgttagaaacttgtgtaatttcttccaaatg

SEQ ID NO: 1722 - protein, 180 aa, Homo sapiens [sequence omitted]

SEQ ID NO: 1723 - DNA, 880 bp, Homo sapiens
  source (1)..(880)
  CDS (201)..(680)
  modified_base (322): a, t, c, g, unknown or other
atctggcagaagaaatttctaagcagcaaagtattcaaggagtgacttgggtgctgttaaaggcattcagttttataagagacgaagagcataaaagtttggaaaatttgcagcctgacaatgtgatagaaaagaaaatccaattttctgaggagaaattcaactggctgcagaaatttgcataagtaacaaggagccaaatgttaatccccaagacaatggggaaaatgtctccagggcatgtcagaggccatcatggcagcccctctcatcataggcccagagccctaggaggaacaaatggtttcatgggccaggccangggtccctgtgctgtttgcagcctagggacttggtgtcctgtgtcccagtcgctccagctgtggctgaagggggtcaacatagagctcaggctgtggcttcagaaggtacaagccccaagccttggcagcttccatgtggtgttgagcctgtgtgtgcacagaagtcaacaactggggtttgggaacctccacctagatttcagaggttgtatggaaacacctggatgcccaagcagatgtttgctgcaggggtggggccctcatggagaacctctgatagaggagtgcagaagggaaatgtgggcttggagctcccacacagagtccctactggggcaccacctagtggagctgtgacaagagggccaccatcttccttaccccagaatggtagatccactaactgcttgcactgtatgcctgaaaaagccatggacactcaatgccagcctgtgaaagcagctgggaggaagctgtaccctgcaaagccacaggagccgagctgcccaagaccatgggaacctacgtcttgcatcagcatgtcccggatgtgagac

SEQ ID NO: 1724 - protein, 159 aa, Homo sapiens
  MOD_RES (41): Variable amino acid
MLIPKTMGKMSPGHVRGHHGSPSHHRPRALGGTNGFMGQAXGPCAVCSLGTWCPVSQSLQLWLKGVNIELRLWLQKVQAPSLGSFHVVLSLCVHRSQQLGFGNLHLDFRGCMETPGCPSRCLLQGWGPHGEPLIEECRREMWAWSSHTESLLGHHLVEL

SEQ ID NO: 1725 - DNA, 856 bp, Homo sapiens
  source (1)..(856)
  CDS (201)..(656)
tcatacaaactctctcccaacattcagaaatactcttccccatcgaatcctctaaaaagtgcttcctcctcttgttattgtcacaccatagaccaggcccacagctatccagacaggtctcatgatgtagacagaagcctccaacctgtgctccatgctatttggaattatttcaaattttttcatcatacttaaccaccatgaatttgcttcatacctcagctaactataacaagatcattaacagccttttttttgttttttttccggtgcagtctcactctgtcgtccaggctggagtgcagtggcatgatctcggctcaaagcaatctctgcctcccagcaatctccgcctcccaggttcaagcgattctcctgcctcagcctcccgagtagctgggattacaggcatgcaccgccacacctggctaatttttgtatttttagtagagaccgggtttcactatgttggccaggagggtctcgatctcttgacctcatggtctgccctcctcagcctcccaaagtgctgggattacaggcgtgagccaccgtgcccggccgccattttgtttatttatttattatttttttacgtaagactgccaacaccttcaattttcctctcaaaatatgatttctttaagattttctagatgtatagtcatcactaaatgcttaagaagtcatgaaataaaagggcaagtagcttgactgtcatgaattttcttccacaaatgttgacatagtatatacaaaattagcagtaagtcattgtctattacttatattatgcttcttggattagttttcaagagaaaaaacaggagcagacatttctcatgaggagtgcaca

SEQ ID NO: 1726 - protein, 151 aa, Homo sapiens [sequence omitted]

SEQ ID NO: 1727 - DNA, 3826 bp, Homo sapiens
  source (1)..(3826)
  CDS (201)..(334)
  CDS (2878)..(2995)
  CDS (3081)..(3626)
  modified_base (3370): a, t, c, g, unknown or other
  modified_base (3568): a, t, c, g, unknown or other
  modified_base (3776)..(3826): a, t, c, g, unknown or other
cccggggaggagtgcaatgtggggtgctcctccccgtccctggggtcccctcaaatctgcagggtcagcaaggccaacctggagccacaggccaggctgggccttccagtcctgtggtgagtgactgggatggggctggtgaggggtgagggtgggcgccctggggcagccagctaaggccctgcaggaagtgggaggcgatgggagaaccgagtttcctcctctctctggagagagggacttctgtctccccaaagggacccccagggcttcctggcttcgggagcaatgctggagctgaggaagagaaggtgagtgacagacacatggccaggtgtgtctcccatcaccctcagccctgaagcctgtgggactctgaggggcctgctctgctccaggcccccagccaccaggccccggggtccctgctcagtgagggccccccacagaccctgtgcccagggcattctctgtgtcttggcctttctcccccatccacgtgactcctcctgtgttccccgaccacctgctcccttctctaggggccactcaggtctcactggactgattgggtcccctgggggagcagggagagaatggggatcagggtcttcctggccctcagggctcccctgaacagaaagggagaggtgagtacagggcctggtcctggagggtggggtgaggggtggggagtgggaggatggggttaaaactcagctgtgggtgagggagctactttttaaaattgtatatagagatggggtctcactacgttgcccaggatggtctctaactccagggctcgagcaattctcccaccttggcttcccaaagtgctgggattacagcatgagccactgcgctgggatgacttctattttctaaaagcaactctactgggagatttatgctgaggaaagtatgtggttatcagactcagtgcccatggtggatgacttctttatttatttttttctttgtagagaagggatctcactttgtcacccaggctggagtgcagtggcatgaccacagctcactgtagcctcgacttcccgggctcaagtgatccccccaactcagctcccccaagtagctgagaatacaggcatgggctaccacaactgtctaattttttatttatttatttattttttttttggagacagggttttgctctgtcacgcaggctggagtgtagagacatgatcttggctcactgcaacttctgtctcccagattcaagcatctctcgcctcagccttgggagtagctggggactacaggtatgtgtgggtgagtctgggtgtgggtgggtgagtgcaggtgtgtctaggtgtaggtgggtgagtatcggtgtgtgtctgtgtgtaggtgggtgagtatgggtgtgtgcgggtgtgtgtgtaggtgggtgagtatgggtgtgcaggtgtgtgtgtgtgtatgtgtttacattgtggtatgtgtctgttgggtgccgccgttagggatttggaagagtgaggaccataaacctgtaaacatttctacatgcctgctccacaacaagtgtaccaagcatggtcaaaagtaactaaaccaagtaaacaaattagacattaattaaacttaatgctgggcaggaaagaagtattcaaggccaggtaaaatgaagaaatataaccaaataaatgaaattttaaaattagtagaatgagacagaaatatttttaaaagtttttaatttctggtgaatatcagtatataaaactaagaattatatggctgtcaattgactaaaaacagtacttaagatttcagctagtgaaatagccatatatgatcttgtaattccatttttctgtctcaagaatgacttgtttaaataattttttttgaattgttacattgtcatcttgaaagagcttcacaaaacttacatgagaatctggattgtcataagaggtctgagtttttaatggtatgttcgtatttctgttatgtacattgatgtcaaacattcatttcctgagctgttctccagaacacaatttgacttataatgaacactcaataaatggttggttggataatcaaatcaacaccttagtttcatcaattttcatttcatataaaagtgactgatcttctatactcatcaatgaaacagagagagatgagggagggatagcagtggagactaagaggatgacaagcagacctcattctgcagtggatatcctacactctccacttctcaatgcttggaaacacttgccatactaaaaaaattggtatttcctaggcagaaaatgggagttaaagaaagtccatatttctatactacaataacttacactataatacatggacgacatacatttctaagctattcacttcatagaaaatgcagatacatttaggtgagcaagatgcaggagaagggttaataatcaggctgagtgtgattgtgagattcagtctaatatcttgatacaattcttgtgtaattgtatcagttgacatatctgttcaaatgcaaggcgggagagttttgcaggagctcctgaaacttcctgcatgatgttaggagacaggttggtccatgtgattaggccagatgtgtttgcttaattgtggcttaggaaagttaagtttctgacctctcacagaaactgggagatagggacgctaaattttataacatttctgtttaatatatatttaataatacataataaagtctttaaaatgtcaattttgtcttttttctagtttgcaatattttgttttcaccgccccattgtttttagtacatatgttttgtgtatttaaaaaaatgtgtggaggcgccctggctcgccccgcgccagaggctcgcgcactcagcaggttgggctgcggcggcggcggctggggaagccgaagcgccgcgcgtgagagatcccagatacgtctgcggttccggctccgccaccctccgcctttctcccgcaggtcttggagccgggtgaggaagaagggaacggccctagccttgggaagccaaagcacacccctggctcctgccgacaccgccctccttcccttcccagccgcggcgctcgctcggtgctcggctactctgccgggacggcgcgcggctgcagatctgtggagagtcctgctgccctccagccgggctcctccaccggcccttgcagggcgcagagagctcggcgcgacccttccgctcgcctttttcgtcagccggctggagcagcatcggtccgggaggtctctgggctgaggcggcgacagtctctctagttccaccatgtccgcgggcgagacttcgggaatccgctgaggaaattcaagctggtgttcctgggggagcaaactntgcaaagacatctttgatcaccagattcaggtatgacagttttgacaacacctatcaggcaataattggcattgactttttatcaaaaactatgtacttggaggatggaacaatcgggcttcggctgtgggatacggcgggtcaggaacgtctccgtagcctcattcccaggtacatccgtgattctgctgcagctgnagtagtttacgatatcacaaatgttaactcattccagcagactaccaaagtggattgactgatgtcagaaccagaaggagggagtgatgttatcatcacgctgtaggcaataaacagatcttgctgacaagaggcaagtgtcaattgaggccggagagcagaaagccaccagggagacatgttacctttattgaaactggggcaaacnnnnnnnnnnnnnnnnnnnnnnnnnnnnnnnnnnnnnnnnnnnnnnnnnnn

SEQ ID NO: 1728 - protein, 265 aa, Homo sapiens
  MOD_RES (181): Variable amino acid
  MOD_RES (247): Variable amino acid
MGEPSFLLSLERGTSVSPKGPPGLPGFGSNAGAEEEKVSDRHMARLGCGGGGWGSRSAARERSQIRLRFRLRHPPPFSRRSWSRPRRSLGARLLCRDGARLQICGESCCPPAGLLHRPLQGAESSARPFRSPFSSAGWSSIGPGGLWAEAATVSLVPPCPRARLRESAEEIQAGVPGGANXAKTSLITRFRYDSFDNTYQAIIGIDFLSKTMYLEDGTIGLRLWDTAGQERLRSLIPRYIRDSAAAXVVYDITNVNSFQQTTKVD

SEQ ID NO: 1729 - DNA, 886 bp, Homo sapiens
  source (1)..(886)
  CDS (201)..(686)
gtacctttctcctctaagtaaagaagccatagatgactccccgagacttttagcaaaactcttggccttaaaactatgctaccatatattcttagaagtcaaaggatgcaacacagagaatacatttttctatgaagattaatacaagtgatattagtggatataaccattaattgtttggactcagccttatcttacaaatgcaaggtcatttatctagatcagtacttaaaaacataaaatttaataaaatgcaatataaaagttggtttaattttgatatgtgctttataggagtgaagctgaaaatatttaaccatatcactcaatatacagtttcttatatatgttactataaaaatattcatcttttttttttttttttgagacaaagtcttactctgtcactcaggctggagtgcagtggcgcgatcttggctggctgcaacctctgcctcgcaagttcaagccattctcgtgcctcagcctcccgagtagctgggattacaggcatgcaccgccatgcccggctaatttttgtatttttagtagaaatggggtttcaccatgttggccaggctggtctccaactcctaacctcaggtgatccacccacctcggcctcccaaagtgctgggattacaggcatgagccaccgcacccagccccatccttttttatggtaggttaatcagttcctgcggttgagagcagacatagttcattatgatcaccttcctatttttgtcctgattacattctttgttgtgtttgttattcgtaaattaaacaagtggtcccacgctaacatttttttgtcattctcttttatagtgttatattccctttgaccattagagagcagacaggcttccccagggaaagt

SEQ ID NO: 1730 - protein, 161 aa, Homo sapiens [sequence omitted]

SEQ ID NO: 1731 - DNA, 943 bp, Homo sapiens
  source (1)..(943)
  CDS (201)..(743)
ccctccccgctacctctgtcatttgttccttatctgtagggtaaccataatcaaattggggttgttgttagtcattcatgagataagatgtgtaaagcccttagcatgagttattacaggtctgtccagaatcccatactcaaaccctgggggccagatgtgattcagaattctgaatctctcagatttagaaaggtaatatggttcacatgccgtgcattatgcagtgccctcaacagagtccgaggttacacccaataacccaacacatcactatttctgcagtaagttgtataaatattcacactgagtgggacatgagttttagcaccaaacatacaaaaaagcttttgattttcatgctctggggaattgctggtattgcatctagaaggttgcgaacctgtgttactatcttcagctcctctagcttggaaaccatcatttttcttggagcagcccattcagctggggatgcaggaggagcaggttggacctggggtgaggcctgtctggcagcacggaggctggcaattgtgattgcctcagcagagcctctgaggctcatctgtctgaatcggagcagaaccctcacggcaccccacccactgcagacccatggcagctccaaccctacagactcttctacgcttagtgggaacatactgattcccagctgtttgcttcacttggcacatggttctcattccagagggaatggctgggtgaacagcaagcactgaggcaaagaggctttcttgaaaaggataaaagtggatgaagtttccagtttgcaggaaagacacagctaatagattaggcagactttaacaagccaagagccaaatgcatgtgaatgtgcttggccaggagttgcagtttgcggctccctggactagagaaccagccctgccacatctttaacagaaagttcttctcctgc

SEQ ID NO: 1732 - protein, 180 aa, Homo sapiens [sequence omitted]

SEQ ID NO: 1733 - DNA, 973 bp, Homo sapiens
  source (1)..(973)
  CDS (201)..(773)
gcagaatatcagcatatttgcagcactgtgcaggggagatcatacccttattgaggggtccatgcttaccaaacaactttttaattatcactcatggatttgcctatagaagttgccaatctactgattcaaatatacagacttcttggcccttatatttttctttttctttctttctttcttttttttttctttttgagatggagttttgctcttgttgcccaggcaagagtgcagtggcgcaatcttggcttacagcaacctccgcctcctgggttaagcgattctcctgcctcagccttccaagtagctgggataccaggcatgtaccaccacacctggctaatttttttgtatttttagtagagacggggtttgtccatgttggtcaggctggtctcaaactcccgacctcaggtgatctgcccgactcagcctcccaaagtgctgggattacaggcataagccaccatgccaggctctttttttttttttttttttttttttctgagacaaggtcttgctctgtcgcccaggctggaatatcgtggtgcaatcttggctcactgcaacctctgcttcccagctcaagcgatcctccagccttagcctctggagtagctaggaacacagatgtgagccactatgcctggctcatttttgtgtgtgtgtgtgtatttttcatggagatggggtttcaccatgttgcccaggctgttctccaactcctgagctcagagcgatccatcaaccttggcctcgcaaagtgctaggattacaggcgtgagccactgtgcctggcccaattttttttttttatttaaatgaattacttcagcatttccagttataaagcagcctcttaagaattctgcttctcaggtgaacagacaactcaagtgtctgaacccgcagggctgagctgccaactcctggctgtgtaactcctcccagataatgcccctccctgagg

SEQ ID NO: 1734 - protein, 190 aa, Homo sapiens [sequence omitted]

SEQ ID NO: 1735 - DNA, 1057 bp, Homo sapiens
  source (1)..(1057)
  CDS (201)..(857)
cattgtgaggctttcatttccacctgctgctctgagcttccacccgggaccttcctttagcattctggcagtgtgagtctgctggtaataaattatctcagcttttatattttggaaaatgtctttatttcaccttccttgaaaaggcgaaggtataatttatatacagtgaaatggagaaatcttaaatgtgaagttaaatgaattttgacaaatgcatatatctcaaatccacacctcatcaagatatagaacactcatatcatcccagaaagtccctttgtgtccctttccaatcaatctcaactcccagaggcaaccactgttcgagatttttttttttttttttgagatggagtttgagatgggcaacttttgttgcccaagctggagtgcaatggtgcaatctcggcacaccacaacctccgcctcccaggttcaagccattctcctgcctcagcctcccgagtagctgggattacaggcatgcgccaccatgcctggccaatttagtatttttagtagagatggggtttctccatgttggtcaggctggtctccaactccagacctcaggtgatctgcccgcctcagcctcccaaagtgctgggattacaggcgtgagccaccacgcctggtccattgttcatgatttctatcataatatattagttttgcatttttttaaaaaacagggttttgctctgtcacctaggctggagtacagtggcttgatcctgtctcactgcagccttgacctcccaggctcaagtgatcctcccacctcaggctcccaagtagctgggaccacaggtgcacaccgccacacttggctaattttttttttttttttttgagacagagtttcgctcttgttgcccaggctggaatgcaacggcatgatcttggctcactgcaacctccgcctgtcaggtacaagtgattctcctatctcagcctcccaagtagctcagattacaggcatgtgccaccactcctggctaaattttttgtatttagtagagatggggtttcaccgtgttagtcaggctggttt

SEQ ID NO: 1736 - protein, 218 aa, Homo sapiens
MNFDKCIYLKSTPHQDIEHSYHPRKSLCVPFQSISTPRGNHCSRFFFFFLRWSLRWATFVAQAGVQWCNLGTPQPPPPRFKPFSCLSLPSSWDYRHAPPCLANLVFLVEMGFLHVGQAGLQLQTSGDLPASASQSAGITGVSHHAWSIVHDFYHNILVLHFFKKQGFALSPRLEYSGLILSHCSLDLPGSSDPPTSGSQVAGTTGAHRHTWLIFFFFF

SEQ ID NO: 1737 - DNA, 2397 bp, Homo sapiens
  source (1)..(2397)
  CDS (201)..(1055)
  CDS (1982)..(2197)
tgcagcagccggtctttcttttgagaaaattatcagactcattgataagggaaattaaatattgaccaaggacaatgtctttatttctcagtaacttatcaacaaatgactctagcctgtggaaagagaatcataattctacggaccttttaaatccgccaggaaccctgaatatctatcttttttgcttgacatgtctcatgacttttgcagccttggtgggcagcatttattcactaatttccctgctgaaaatgcagaacagaactgttgtgtccatgcttgtggcttcctggtctgtggatgatctcatgagcgtcctgtcggtgaccatcttcatgtttttgcagtggccaaacgaggtccccggttacttccaatttctgtgcaccacctctgccttaatgtatttatgccagggcctctctagcaacttgaaggcgactctcctagtctcttacaacttttatacgatgcacagaggtgtggggagccagacagcctccagaagatcgggccaggtgctcggcgtggtgctgaccgtgtgggcagccagtctgctgctctcggcgctcccgctgtgcggctggggcgccttcgtgcgcacgccctggggctgcctggtggactgctccagctcctacgtactattcctctctatcgtgtacgctttggccttcggactcctcgtgggcctctcagtcccactcactcaccgattgctgtgttcggaggagccgccgagactccactccaactaccaggaaatttcccgtggagcttcaattcctgggacccctcctactgcggggagagtggtttccctgtccccagaggatgctccaggcccgagtctgcggcgctctgggggatgctctccgagctccgacaccgtgttcggaccgggtgcgcccgctgccgctggggctgaagcctgcaggcgtgagaaccgggggactctctatggcaccaggagcttcaccgtgagcgtagcgcagaagcgcttcgctttgatcctagcgcttacaaaagtcgtcctttggctgcccatgatggtaaaagtgcagttgctcacaaagcgcgagtgtgtgtgccagacagtgtaaatgagtgttgggaccggcgtcgccggtttggggagtcaccaagagacacacagtgaagtccgcttccaagtgtatctcgctgggttttagacatgcacttagaagaaggcagttcgggacagggctagttggctgcgaaacctttactactaaatgcttctcctttcaaaagtcaggggcatggggatcgctttccgtcgcgagcgacttagttttccatatcggtggtggccaaggatattgtctcacacagcaaaatcagagagtattcagaaaaggaaagagggaattaaaaggttttttccccacaaccttctgtcatccctttctcgccgttccattcccgcctagagaggacgacgcccatctccagcagggcgggatagaggggaggagagatcagttgtggagggagaagacagggaacaaaacaggcttttgttcctccttccaggaggaagccgattaagaggtggcagagtggcgccccactgtgacgagcgcgcatgggcggaggtgagggtccagggaggcgacaaaggccattcggagaatcagatgcgggtttcacggacgcctgtttcctagctagcgtcccccacgttgtagactgtgcctttctggtggagtcttgaataggcagcgggcgcagatccggcactcaaaagctgaaacccctcccaaccctgggggtgtgccccgccgttcccaggagcccatcaccaaggacagggagccagctccgtagcagaggtccccgctgtccatcaggagaaggaactggaaagggaactgaggcagcgtgcgtggagaaaaggcttgagaagtacaaagtataattttaggttaggtctgaagttctcttgcccttgcagatgcacatggtggtccagaacgtcgtggggtttcagagccttcccttggagacattcagctttctacttaccctgctggccaccactgtaaccccagtgtttgtcttgtccaaacgctggacccacttgccctgtggctgcatcatcaactgcaggcagaacgcatatgcagtggcgtccgatgggaaaaaaagtaagtcctcaacactgcagtgattggcagcaatatgcattaggtgactttcagaaaagtggtctattaacaaagttgcctcagtaggggatggagagtccaaggataaatgtcagtggtaaatagtgagaagaaattataacatgaaacaatcactacaacagtttgggggtagattttaaattcagctggttttgaaaaaccccatgaagtgcctgtggta

SEQ ID NO: 1738 - protein, 356 aa, Homo sapiens
MTFAALVGSIYSLISLLKMQNRTVVSMLVASWSVDDLMSVLSVTIFMFLQWPNEVPGYFQFLCTTSALMYLCQGLSSNLKATLLVSYNFYTMHRGVGSQTASRRSGQVLGVVLTVWAASLLLSALPLCGWGAFVRTPWGCLVDCSSSYVLFLSIVYALAFGLLVGLSVPLTHRLLCSEEPPRLHSNYQEISRGASIPGTPPTAGRVVSLSPEDAPGPSLRRSGGCSPSSDTVFGPGAPAAAGAEACRRENRGTLYGTRSFTVSVAQKRFALILALTKVVLWLPMMMHMVVQNVVGFQSLPLETFSFLLTLLATTVTPVFVLSKRWTHLPCGCIINCRQNAYAVASDGKKSKSSTLQ

SEQ ID NO: 1739 - DNA, 898 bp, Homo sapiens
  source (1)..(898)
  CDS (201)..(698)
aggacccggcacgggcatttgttacatgcacagaatctcagtgcaactgaggtgtgcacctgtgcttggcttgttagaaaagtccttgagtctaatttaatctttacgatgactcagggcctggccacagatctcacgtccccacccgcctgacacccagggctacttggaggaagtgaccactccatgaggttgtgttgatggatgtgttggacccgaggcacgaatgtgaccctcggtggagaagactcgctgagcaggggagggagcctcagaggctacaggtggcactggtggggacgtggggagaggaagacctggaggggtggggtggggtgatgttgggtgcttctgtgggcatccacaggtcctgggcactggggtggcagatgcctcgggggtggccactcacccaggaaagcagcccacatggaggagaggtgggtgcccagagttgcacccattccacagggaagctgccagtagaatccagctcccaaagtgctctgggcttcagcagtgggacctttgtcaagggtggaagcattacccagtcccctgagacaggggaggcagagggagctggacagaggcctccagctggtgggggctgggcaggaagaaagttgagccctgatgggagaaggaaggtgggagatggggctggcaggtgtctgcaaggaagggtggggtgctgagggctggagtccaggaggggcttcaggatggggtccctggaccttgtatcgtccatccccaaggcccaaggagggggctgagaggacagcaggctgcagggactgcaggctgttggggttgaggggctgtgattgggggccaatgtttctaaccactgtcccaggcctgcttcacagcttatgtaccgagctgacaccaa

SEQ ID NO: 1740 - protein, 165 aa, Homo sapiens [sequence omitted]

SEQ ID NO: 1741 - DNA, 1318 bp, Homo sapiens
  source (1)..(1318)
  CDS (201)..(1118)
attaatgaaactaagtttttttttaatacaaaattgatgaaattttagctagactaatgaagaaagtgagagaagactcaaataaataaaatgtaaaacaaaagaggattgcaactgataccatagaaatacaaagaatcatgagagactaatatgaacaattatgtgctaaaaattggattacatagcaaaaataatttatggaaacatacaaccaatcaagacagaatcaagaaaaaatagaaatttcgaacagaccaataatgggtaaggagattgaatcagtaataaaaaatatcttatcaaagaaaagcccaggactagatggcttcacagtggaattgtgtatatatacatatatacaagtatatacaagatatacttgtatatatacacacaagtatatatatatctacaagtatatatatctacaagtatatatatatacacacgtatatatatatacgtgtatatatctacaagtatatatatacgtgtgtatatatatacaagtatgtatatatatacaagtatgtatacatacaggtgtatatatatacaagtatgtatacatacgggtgtatatatatacaagtatgtatacatacgggtgtatatatatacacgtatgtatacatacgggtgtatatatatacaagtatgtatacatacgggtgtgtatatatacaagtatgtatacatacgggtgtgtatatatacaagtatgtatacatacgggtgtgtatatatacaagtatgtatacatacgggtgtgtatatatacaagtatgtatacatacgggtgtgtatatatacacaagtatgtatgtatacatacgggtgtgtatgtatacacaagtatgtatgtatacacaggtgtgtatgtatacacaagtatgtatgtatacacaggtgtgtatgtatacacaagtatgtatgtatacagaggtgtgtatgtatacacaagtatgtatgtatacacaggtgtgtatgtatacacaggtgtgtatgtatatacaggtgtatatatgtatacacaggtgtgtatgtatatacaagtgtatatatgtatacacaggtatatatgtatatacaagtatatatattattcttgttgaactcttccaaaaaattcttgtcgaactcttccaaaaaattgaagaagaaaaaatacttccaagttaattttacaaggcagcattaccctgacaactgattaccctgataagccagccacagacactagaataagagaaaattatcccgaacaatatccctgaagaatgtagatgcaaaagttctatactaacaaatgtaa

SEQ ID NO: 1742 - protein, 305 aa, Homo sapiens
METYNQSRQNQEKIEISNRPIMGKEIESVIKNILSKKSPGLDGFTVELCIYTYIQVYTRYTCIYTHKYIYIYKYIYLQVYIYTHVYIYTCIYLQVYIYVCIYIQVCIYIQVCIHTGVYIYKYVYIRVYIYTSMYTYGCIYIHVCIHTGVYIYKYVYIRVCIYTSMYTYGCVYIQVCIHTGVYIYKYVYIRVCIYTSMYTYGCVYIHKYVCIHTGVYVYTSMYVYTGVYVYTSMYVYTGVYVYTSMYVYRGVYVYTSMYVYTGVYVYTGVYVYTGVYMYTQVCMYIQVYICIHRYICIYKYIYYSC

SEQ ID NO: 1743 - DNA, 874 bp, Homo sapiens
  source (1)..(874)
  CDS (201)..(674)
tgaggaatcacagacccgcggcttcagttcacatcaaaggggctctattgtcagctttaaatttatctcttaaagagccaagaaaaaagtcagataaaatggcaagaatgcgcaagaaaggcaagaaaaggtgatcaaggaagctgaaagaagccattcccgctcagagaagggaacggtcacggaaagaacgcactcagatggcacttggagcggccgttcttcagtggacggttttgttttgttttgtttctgtttttgttttttttgagatggagtttcactcgtcacccaggctggagtgcggtggtgtgatcttggctcactgcaacctctgcctcctgggtccaagcgattctcctgcctcagcctcccgagtagctgggattataggcacacaccgccacgcccggctaatttttgtatttttagtagagatggggtttcactatgttggccaggctggtcttgaactcccgacctcaggtgatctgcccatcttggcctcccaaagtgctgggatgacaggcgtgagccactgctctgggcccaggggacaggttttgaatagaagcaaagaacagctcttggcttatggagggaagccattagtaggcaggatgaaccgggtgaatacactggaaaacacagaacagctttcgtgccattattagtaatgagttgtgaagtcaaaacgaaaagaaaacagctttaaaaaaccatcaggagtcaaaaacagctttcagcctcaccgtaagggaagctggaactaataatatctttccagtgtttacttagagaatgatgtcacggcaccgtctcgtgggggcagacagaggcacacagggcagagccctgagaaatccactttacc

SEQ ID NO: 1744 - protein, 157 aa, Homo sapiens [sequence omitted]

SEQ ID NO: 1745 - DNA, 1024 bp, Homo sapiens
  source (1)..(1024)
  CDS (201)..(824)
ttgcataagtaatgagaagccaaatgttaatccccaagacaattgggaaaatgtcttcagggcatgtcagaaatctgggcatcccctcccatcacagcccagaggcctaggtagaaaaagtagattcatgagctgggcccaggatcctgtgccatgtggagcctaggtgcttggtgcccagtgtcccagccacagcagccatggctcaaagaggccaacatagacctcagaccatggctcagagggtacaagcctcaagtcttggaggcttccacatggtgtccagcatatcagtgcatagaagtcaaatattggggtttgggaacctccacctagatttcagaggatgtatggaaaaacctggatgtccaggcagaaatttgctgcagaagtggggccctttatggagaacctctgcttgggcagtgcagaagggaaatatacgtttggaggtcccacacagagtccctactgggacactgcctagtggatctgtgagaagagggccactgtcttccagaccccagaatggtatgtacactgacagcttgcaccatgtgcctggaaaagccacagacactcaacaccagcctgtgaaagcagctgggaaggaggctgttccctgcaaagccacaggggtggagctgttcaagaccatgggaacccacctcttgcatcagcatgacctgaatgtgagacataaagtcaaaggacaccattttgtagctttaagatttgactgtcccgctggatttcggacttgcatggggcctgcaacccctttgtcttggccaatttctctcatttggaatggctttatttgaccaatggccatactcccattgtatttaggaagtaaccaatttacttttgactttacaggctcatagacagaggagacttgccttgtctcaactgagactttggactgtggacttttgaattaatgctcaaataagttaagacattgggagactgttgtgaaggcatgattgattttgaattgtgatgacataagatttgg

SEQ ID NO: 1746 - protein, 207 aa, Homo sapiens [sequence omitted]

SEQ ID NO: 1747 - DNA, 892 bp, Homo sapiens
  source (1)..(892)
  CDS (201)..(692)
ccacctgtctgctgtgagctcgtccactcagtttccagagcaattattgtcctgagcagagaggcctgtctggatgggcagtgtgctcctgcccttagggtagacgggccggctgagctcagccgacgtggggtcatgtcctgtttacacagggaaggtgaagaaggagctggaccctgacgacagccatttgaacttggatgagacgacgaagctcctgcaggacctgcacgaagcacaggcggagcgcggcggctctcggccgtcgtccaacctcagctccctgtccaacgcctccgagagggaccagcaccacctgggtgagatgcccccacccacgccgcatccccagagaccccagcacagtcagtgtgacgtctagacgaggtagtgggcagcattgtagttgtgggaaggctggaggctgcatgggcagcggtgctgttgtggaggtcggtttccacagatgtccttgggtcgcggcctcggtgcagagccggagcggagctgggatgctggcctggccgcacgctgggttacaggctttctgccagataccgtccccagttctgtccacccctgtgccctctgtggaccctggttccagtgtttctgctggggagagagcatggcttccttggccatgtgtcctggagtggttttggtgggtggggttttgttcccacttgtaaacactggatcactctgtcggcagagtgaatcttggcagttcttcagctgcagaggtttagctgcaaccatctgcaaaaaggccggtattttcgattccattgaccttgtgatcagggtgttaacagtgcatggagcaggctttggagggccgtaggtcaaagtctgaggcccccgatatcccagtatgactttgggaact

SEQ ID NO: 1748 - protein, 163 aa, Homo sapiens
MRRRSSCRTCTKHRRSAAALGRRPTSAPCPTPPRGTSTTWVRCPHPRRIPRDPSTVSVTSRRGSGQHCSCGKAGGCMGSGAVVEVGFHRCPWVAASVQSRSGAGMLAWPHAGLQAFCQIPSPVLSTPVPSVDPGSSVSAGERAWLPWPCVLEWFWWVGFCSHL

SEQ ID NO: 1749 - DNA, 871 bp, Homo sapiens
  source (1)..(871)
  CDS (201)..(671)
acctccaccttctgggttcaagcaatccttgtgtctcagcctcccgagtagctgggattacaggcatgcaccatcacacctggctaatttttgtatttttagtagagacagggtttcaccatgttggccaggctgctcttgaactcctgacctgaagttatttgcctgcctcagcctcccaaagtgctgggattacaggcatgagccactgcacctggccttgtcattctatttttaaagagaagttcaatgctgttagaagcagctatcccatttctacatctctgaatttctcacatcttttatactctttggaagcaggaagacagtatcaaaaagttttgcttcacatgggcatgttatttcagatgtccattgataataatttatttggccatcttgctactatatactatgaacttccagattcctatcatgtgaatattaatgagactttgactcattctgccccagttaatctagataaccccagttttctcacgttttccttagagtctattgcctacaacacatctgctggtgccaatttttgttttgaacggtattcttggttgcaagccagggaaaccaactcaggcatcttagccagaaaaggaatactagggcctcatagaattggcaggatgctggagaccaggatcagaaattgaaacatataaaccaaggtagctttgggaagtcaggatgctggaaatacaattgtctcttgaagaacactcttcccagaatttagctgctggggttggcacctccccgcaacttttgtttcctctcttaccatatgttctttgcacacaccagctcctttttgccttccaccatgagtggaagcaggttgaagccctcacca

SEQ ID NO: 1750 - protein, 156 aa, Homo sapiens [sequence omitted]

SEQ ID NO: 1751 - DNA, 1318 bp, Homo sapiens
  source (1)..(1318)
  CDS (201)..(1118)
ctttgaggacaggtggatgcggttttgcttagtagtgtttctggatatgccttctgattgaaactgagattttgtttctatcgtgactgcttggcatattctgctcacctggatccccttcctccccatagacctatatgttccagatacttgaagaacacacctaagacaagtacaacagtgtttgcacgtgtacacctatgcacacgagctttgcacaagtaaaaaaaatcttttcaatttctcaccgttatttagtgaggtataaccttttttgttatctttctttaattattattattattgttatttacaaagggggatatatgccaaagagcatacaactcaaaccggtagagtcaggatataattcaagtcttctgaccacaaatctaatgcccagattgaccgctgagaggtacaaacacatccaagtactggtaagatttctgttaccctcttggatagtagcttgtctggctgatttctccacccagggaagacaagcccaaggaccgggaagtgctgtggtagaagggtatgttattccgtgtaatccatgtaactcttcagcctgctctcagttagactggatgaaaagaggtgtgtcatcttcaagaagagaagaggcttcctctgctattacccaaggctcccagcaagagtgggggccctctgagcagattgcgggtcgaatggaggcacttcatcaggtaggggagagtgtagaggtcatacttggagggtggctacattcatgcagatggtgtaactcctgcatgacgtctgtcccagaagaagatactggtagtataaagttgctttccccagggcgctgtaatcagctacaggcagcgctctatgaaggccatcaaaaaactggggagttgagggaccttcagttactggaatatgcctgttacagaaaatgcttcttgattttgcttcttcttccttctgagttgctgtggagattgtgtttggcatggagatctggtatcttctgtgatgctcagtatgagggaccatctttcaagtcaggtcaagagtataacagcctaggagacaccttggacctttcttctaagagcaccccttatacaccatgcttacattagaatttctcctcctctttttcttttgccttcttcatctctttttttcatatttttttaaaaaatacattttattgcatatatttgaggtttacagcatgatgttatgggatatatacagatagtaaaatggttactatagtgaggcagcttaacatatctatcatttcatatagttattttttgtgtatgtgtgacaagag

SEQ ID NO: 1752 - protein, 305 aa, Homo sapiens [sequence omitted]

SEQ ID NO: 1753 - DNA, 958 bp, Homo sapiens
  source (1)..(958)
  CDS (201)..(758)
ttaccaacactatttccccccttgacctgagttctcctaattcctgagttgaggcctctctctcctggcccctgaggacacgtcccagggtttagcgcggggcctgcacgctgtaggtgcccaataaacgtgagtgggtgatggagggatcaagccagcaacaacaaaaaggcatgtagggaaagaattcctcatttaggatgtccacgagacccacaaagaaatgcgtgtgttgtatgtgtatgctcacaggtgtgtgtgctgtgtattgtgtgtgtgtgctcccaggcgtgtgtgttctcacaggcatgtgtgtgctccgtgttgtgcatatgtgcttgcaggcttgtgtgtattatatgtgtgtgcttgcaggcatgtgtgtgttgtgtatatgtgctcacaggcatgtgtgtgttgtgtgttgtgtgtgtgtgctcacaagcatgtgtgtgttgtgtgtgtgctccctggcgtgtgtgtgttgtgttgtgtgtttgtgctcgcaggcatgtgtgtgttgtgtgttgtgtgtgtgctcacaggcatgtgtgtgttgtgtgttgtgtgtgtgcttgcaggtgcagctgtctgcttgtgggtgtatctgggataatgggcagagccagctatgcgtggggctctaccagcttgggacgttttgtctgtgtgttcccaccagacagcgctgtgtgcaagtgtgggaattctgtgtgctgtgcacggggccacccagagagcaccagaactggccctgaatgctctgctgactgcaacacagcaaaggatgtgcagcccctgactctccctgtcctgcgcgcagtgctcacaaccttctgcctcggatcatccttcggcacagtcttttgtcctttcactcaggcatcagcaaacatccctcaggtcctcctgtacactgccatctgccactctcggtggctctccagtgggtctctct

SEQ ID NO: 1754 - protein, 185 aa, Homo sapiens [sequence omitted]

SEQ ID NO: 1755 - DNA, 982 bp, Homo sapiens
  source (1)..(982)
  CDS (201)..(782)
tatgaaaatgaaaaggcaaaggagaaattggaaaacaatctgcaaaacgtatctgacaaaggaattatgtctagaatatatgttttaaaaactcttacaactaagtaatataaaaagaaaaaagtccattcaaaaaaatgggcaaaaaattgaacagacacttgaccaaaaaaaatatatagcaatggcaaaaaaagtacatggaaagatacttaccacacatcatcagtgacatgcaaatcaaaccagtgagatactactatacacccactagaatggccaacattagaacaaatgataaatacaaaaggttgggaaagacatggagcaactggaactccttagtaactgctgctgggaaggtcaaatggtacagtttggtagtttctgaaaatattaaacatagatcttccttcaaccctgccatgctaggtattcatccaagagaaataagaacatgtccacacaaagatttgtccacaaatgttcatagaagttttaattgccccaaactggaaacaatccaaatgtccaagatgggaatggatagacacattgtgatatataaaaacaatggaatactactgagcaataaagaggagggaattactgatacatgcaacagcatagataaatctcagaaacattattcttgccaaaaggaaccagacacaaaagaatacatactatgtgattccattttatctgtactgacagaaagcaaatcaattattgcttggggcatgagaaaattttttgtgagtaatggaaacatcctctaacatgattgtagtgatgtttacctgactgcatacatttgctaaaactcatcaagttgtactcttaaaattggtgaaatttattgtcttaattctgtctcaatttttaaaaatgaggcagctctacaaggtacatatggaatagactccaaagttcatagttaagtggaaaaaactaggtgcagaaatatgtatacagtata

SEQ ID NO: 1756 - protein, 193 aa, Homo sapiens [sequence omitted]

SEQ ID NO: 1757 - DNA, 979 bp, Homo sapiens
  source (1)..(979)
  CDS (201)..(779)
aatgtggccatgtgcatattacatgttgtcatcataactgcccttcttgcctgttttctggcctcctgtcactcttcccttgaccccgtgctgtcttgtgggccactggcattgctcagcctgccacctgctcctcctgcggctggagaaggcgtaacacggacagtgtcaaggtacaacaaactgtaacctctcagaaaatgaaggcatgctggatgagtgaaggagatgtttctgtgctaggctccatgtgtgtccacaggtccatgtgtgtgacatggctccgtgcatgtgtgtctcatggctctatgcatatccatgtctccctctatgtgccatctaagtgcctcccatggctgcacgtgtgtgacatggctccatgcatgtgtgtctcatggctccatgcatgtgccatggcactatgtgtctcccacagctacatgcatgtctcatggctccatgcttgtctatggttccatgtgtgtcccacagctccaggcatatccatgtctttatgtgtgtccatgtatccatgcatatcccatccctccatgtgtgtccacagttctaggcatgttcacaactccatgtatgtatgtcccatggctccatgtgtgtcccatggttccacacatatcccatggttccatgcacgtccacatctccttgcatgccgcatggctccacgcatgtcccacagttccatgcgtgtcccatggctccatgcgtgtctcatgatgctctgtttcttctctgggatttggctgtctggtgtctaatgcaccaagcagttgtgtggagtcatggtactggctgagtttagcctcttcattaggatacagcaacctcattgccacaggacaggctgcagtagaggattcctcgagtccctgtgagattccagaggtttctgagtctgaatatataaatcttgggtaaaactgcttccagtatttctctctgttcatctagtctcaga

SEQ ID NO: 1758 - protein, 192 aa, Homo sapiens [sequence omitted]

SEQ ID NO: 1759 - DNA, 880 bp, Homo sapiens
  source (1)..(880)
  CDS (201)..(680)
tttctagttaaaatggaagttaatgagagcagacatttttttcatatttataactgtcactttgttaatcagaactgtatctgaatagagtaggttcttagtgattatttcttcaataaatgaaggaataaagtatgactttcaatttgggctaccccaggtgagatgaaggcagagatgaattgctgatgctttgagaaatgcaatcccagggcagaaaggatgtgggagcaaggcagaaatggatgggagtcaatgccagccaaggctttattgtgccaacccctcttcaccatgagccagaaagagatccagccagttgctcagtggagcatctgcttggctctatggaatgtctctgcacaggctgtgcagaaaagtcctgcctcagagcagtcctccagagagaagaaatgtatcttctcggcttggtcctgtctcctgtttcccactggatgattttcactacctggggagtcagctcccacacgtccatgccatctggtacgattattttttatttttttttagaaacagggtcttgctctgttgcccaggctatagtgcagtggcatgaccatagctcactgcaactcctaggctcaagagataatcctgcctcagcctcccaagtaattagagcaactagcgcacatcgccacacccagctaagtttttaaattttttgtagagatggggtctatattgtccaggctggtctcaaactcctggcctcaagcaatccttctgcctctgcctcccaaagtggtgggattatagatgtgagtcactatgcctggcctatctgatgcctttaaaagccacttaagaagttatatccaaagactctgtctcagggggaggagccaagatggccgaa

SEQ ID NO: 1760 - protein, 159 aa, Homo sapiens [sequence omitted]

SEQ ID NO: 1761 - DNA, 1159 bp, Homo sapiens
  source (1)..(1159)
  CDS (201)..(959)
aaaggggagaaggtgcatgcaaatcatcctgacctatgggcaaggagaggagcagcaggggaaaatggagagctagggaaagaaggcgcttaccaggccacctccacaggtgctgaaagaagccagcgagccagggtgccgcagcacagctccggtgtagaagcagcctgcgtctggtggcgcgggaggttgcggggcggatgctgcccccgtggggccggggccgggatttggccgctgttccactgcgaagcgcggcgccaggaagcggccgtctctccggagcagcaggtacaggtcccgagagaaggccgggatccgcagcaacacttcgtcgccatccggctcggcatgctgggccgggggcggggacgggggcggctgcgggggaggcggcggctgccacgaggccggggcgcccggggacaaggcggcagccccgctggatccccgcggcagctcctgcgactcgagctcctcgtcctcctcaccctccgacggcggcgggggccggagccgggactctgatcggccctccacgggctcctccaaaggcaccggagccacagagcgcacctcgcgtgagctgccggcagcctgcgcccgggcgcttccgccgcccccaacgccgcgcacccagcccgggtccgcgctgcccccgctgccgccagccgggtccaccggctcccggcgccagagcgcaggaaacacgacttcccactcctcgcggtcgggggcgaactgcagctctgcgggcggggcagacagaagtgcggggcttaaagtgccgcggttccagtagcacaaacatttccaagctcacagtccatagatacagggcgctcgcgttgaatgcaatggagaccacccgtctagaccctgaaactctgcaaccccagaagccttgcgatcagattacagaccccagcattttcagagtaaaagtacgattatattaggggcgggggagggggaatcaaagtttggtgaccgcacttcattgttgaaaagaaaaccgatgcaaagactccagcacgagtaaacgatttctgaagtgtatgctagagcagagcgttgctatcaacttaggtacgttctaattttcctccaggtgctgtaaacgtacctttgcaaatattattgctctaattagaaggaa

SEQ ID NO: 1762 - protein, 252 aa, Homo sapiens
MLPPWGRGRDLAAVPLRSAAPGSGRLSGAAGTGPERRPGSAATLRRHPARHAGPGAGTGAAAGEAAAATRPGRPGTRRQPRWIPAAAPATRAPRPPHPPTAAGAGAGTLIGPPRAPPKAPEPQSAPRVSCRQPAPGRFRRPQRRAPSPGPRCPRCRQPGPPAPGARAQETRLPTPRGRGRTAALRAGQTEVRGLKCRGSSSTNISKLTVHRYRALALNAMETTRLDPETLQPQKPCDQITDPSIFRVKVRLY

SEQ ID NO: 1763 - DNA, 988 bp, Homo sapiens
  source (1)..(988)
  CDS (201)..(788)
agccttaagcttcagttctttcttccttcaggaggaatagggcccgtacatcacagggttgcttgaggaataagtgggagagagctgacggttattgaacctcgattaaaacctcacctctgctcagccctgtatgggtggttattctggttttacagatgggtaaactgaaaggggtgggggacggcagagatttgtgaatggcagggcaagatcccctaggtgttctcctggatgaccgggctggttccctagggctgcagccaccagcttcctggaaccacctcttccagggagtcctttgggtctttctctgcagacaaatcagcctcggccctgctcgtggcaactttcctccaatcaggcaggggttgagaagagaccagagagctgtacccagggattgggagacaggagatactccctgctgtttgtctaaacctaaagtttcttcttcccttaatctccacctctcactagatagatctgccaatctgcttccttcccaaaaggtaggtagttattcccattttacagaagaaaaaaaaatgaggctccagaaagttgcatgcctcaaatcattcaatgagttccatgcctcgaatcatccaatattagatcattcgatttcaaatgtgcacgatgcccaggaagatctattggaaagggaggtaaaaagtaacatcgataatgacttaagaaatgagaataatatcccacatttactaaatgctaggcactctctcatgttacagctgctgaatctgcagtgcagaaaagtgaagtgatttatctagtctcacaggaaatacatggttcaaccttacttgaagccagttcagctctagatcttgaagccagtttagctctaggagatccgaagcagagctgtctcctgggtcagtgcctgcttccagcacactcagcgctactcggtattttgtaaggcttgtcacctagttctcaccagcaaccctgtggatgggca

SEQ ID NO: 1764 - protein, 195 aa, Homo sapiens [sequence omitted]

SEQ ID NO: 1765 - DNA, 11211 bp, Homo sapiens
  source (1)..(11211)
  CDS (201)..(397)
  CDS (3400)..(3683)
  CDS (5234)..(5338)
  CDS (5524)..(5962)
  CDS (6979)..(7368)
  CDS (7641)..(7956)
  CDS (8911)..(8989)
  CDS (9382)..(9622)
  CDS (9698)..(10111)
  CDS (10573)..(11011)
  modified_base (5402)..(5501): a, t, c, g, unknown or other
attcaagcacatcgaatcactctgcaggcccgggggtcacaggcttggcagctgcggctctgctgtcccgagccactcatggtgagctgcctccctacgaattccagccgctgtcgcgcccttgagttctgtgtcctgtgaccaccttgccaggccacttggtgaacacgccttcctctctgtctttaaaacaccagacgatgcagtttcaaggaaaactaaaattcctgtttggacagaagaagaaggcgccgtcaggagccatgctcccgccgcggctgtcgctgttctgcattgcggcacccgttctcctcccctccgcagcggagatgaaaatgaggagcgcgctcctgagggcaaaacccagagcagacaccgcagccaccgcggatgcaaagtgagtaagactcgcccttcacagccacatggtgcctgctggcggcccccacaaaacacctccacactcagtgttttctgtgtcttctttcttcatttccagccagtaataagtcagtttcgtgtcgtaaaagtcattacacaacataggcagcagcgattagatgaaacaatgtttttcaaactcgtatttgcaaactggcaccaaacgttgcctgtatcgattcattcctaaatcatcctgttacagaaccagtttcagaataagtgtcctgaccccgtgtcctcaagaaaatgcggagctggctgtggcccctgcctttctccatctcttggctgcccgcccttcacaccgtctgtctatggacaagtggaggtagttcccggctgcaggacatgccggagagatgcgtccctggtgggcagatggagggtgaacggcacagctgcccctccagctggtcctcgtccctggccaacccaggcctacccacagctccctcagcctttcagaagtagaaaacaccctgttggtccccgagcttgttggtactagggaccagtttggtggaagacaatttttccacagactgggagtggggggatggtttcaggatgattcaagcacattacgtttactcactatgcatttcatttctgttttattacattgtaatatataatgaaataattatacaacttggcataatgtagaaccagtggtagctctgagcttgttttcctgtaactaggcggccccatggcgggggtgggggtgatgggagacagtgacagatcatcaggcattagattctcatgagctcgaacctagggctctccctcacatgcacagttcacaacagggttcacagtcctgtgagaatcatgccccagctgagctgacaggcagtggagctctggcggtcacgcgagcagtggggagtggctgtaaatatagatgaagcttcactcgcttgcgcagggcccacctcctgccatgcagcttggctcctagaggccatggacgggtaccaatctgtggctgggggctggggacccctgcccttggggattcgtgtctatagtttcctagaatgtgttaagtctgccttgcgtgctgggagagatgcaaatgctgtgcctatagaaactgtgttccacatgctgggaacacaccagtgaggtagggccggggctgccaggatgccagagatccaacttcctctcagagaatcgtgcaggagtgaggtagggctgggccgccaggatgccagagatccaacttcctctcagagaatcttgcaggagtgaggtagggccggggccgccaggatgccggagatccaacttcctctcagagaatcgtgcaggaccccttccccggccacctgggcgagttgccgctcctgccacttcctcctgggacagcctgatggggcggggctgagcgcagggcagaggggtggtctgggccggccctgcccctgccccctggccctcagcccccgggtccttggctgtcggtgaggtgctcctgctctgtgactccgagacccacccgacttgtcctcggcccctcggcgctgcaggcccaggccctggtaaccaagtgcagctcagccttgccgcgcgatcctgcagccgccactgggcagcccgctttgttcgtggcctccccactctgtgggtagcaaatactgagtgggaaaggaatcttagcaggcgtcgaattcagctccccagccagcccagtgggaatctctggcatagcgcccaggagtgattggctgaggctgcacaaaccccacacggaaaacattgctgggttcagacagaaccttgagagcagattcttcgtggtgtgactcgaatctcactgcctggggttgccacggccctgtgttggctgagcgctctctgctctgtttgccttgccccgggttacggtttccagatatgtcctgattccgatgctcctcctctgtgcatggacagccccggggatgttcacagcagatggagctgtgcagaccggagcagacgtccccgccctgttctgggcgctgcctttactgctgtacctgctgtggcaggcgcgttggggtgatcttaagttgcagtcacgtgtgttgccttgtggtccgactttgaattctagctgcattccttaacttccattagtattcaatttcattttttagatgcggtcttgactgaccttgtcagagtccaggctcccgaactagtttgagatctgggactcagcagcacccggcacgctgccgtccctcctgttctttggcgcctttgacgggcagcacatcttctgtattcacacccgtgccctccgtgggagcaccaggacccgccactgagccccctctgggaggaccccgtcacacgcctgctggcttcccgatgcagaggatacggccgagggccctttcgccccagggggcctgcaaaggaggaccttggaggctctgggacgccctgctcagtgtccagggttgactgtgaagggcttctgtctgcaggccccaaggccaccttgccggcactcacggtggtctctgttgtgggcgtgagttccatcctcacctttgacctctttcagataaccgtttagacagctctacagtctgacagcagcagcggttatttgaaggttttcatgctgtgttggtttccacgttcgttactcatttctgcttatgagcagcttctgcctgggccctgctagccccacctcactgctgctgtctgagggtggacagagggcagctccagggacggccaggacacgggtcagcctgctgaggcccacacatctctggaaggttttaaattaaatgtatgtaccttattttaaaggatggaaatgtagagtgcaagggaggaacatagaattctaaagggaaaagaagtaaatgctacataggtgcacagaaaaggacctggggtctctgcagggctcgggcccaggtcttccggcacctacagggaccacgcaaaccctggaacactgtcctccgcttaccgtcaccgtggagtttccactgcacatggcaagcccggtcttccctgggagttcccaaccctagaagcagaggggacgcagccccctggtgtcagagcagggcagggcaggcctggccctgtgtgcgcacagccctgtcccggccctggggtggagcgtaggtgtgggatcacaagctcaggtgtggggccgaaggtcacagcgctcctcctgcggcctggacgagaccccctgtggggctgtgagggtggggtggagcccaaggcacataaagctggcacacaacttcagctcaacaaacatgttattcaaactcagaagggggaagaaaacttgccaaaccaagaatactgactcccatgagccgaaggcttttggaattctccccaccctgctctgagctggattcagaagccggctttcaggatacaccttgtggtccaccagtcctgagccgcaggactgtggtccagggcaccacagtggtgcaagatgcaaggtgcattctgcagaatcagagccctgaggcagtggcagcagcctccagcggcccccaacagcagcccccatggcccccagcagcggcccctagcagcccccaacagccccccagtcttccacagcttttcccacaggggttttgtgacatgatcttgatctgcctcttcctgaagcccattctgtgaattcctctgctcgccataattcactgggacccccatgtcaacacaccctgtgctttgcagccattcatggacatagatggggcattgtgagtcttgtgttagtcatgggcctcctggaggtgcccagaggacagagaggagggcagcaccggagctgtggctgtggggccagtcagatgggtttgaactcaactctgggacctgctggtggggcagcgctacttactgtttctcttttgaaaagcaaaagaaaatagaatctaccagggtgagttgttgggatttaagattcagatcagtgtgatgcgtgtgtgggtacacacacatgtcccgtgtgagttggtctccaactcacctcagtgttcacttcctggaacataactacctggagtcatgagaatggaccgtattttctttctggccttccaggaaaaaaatataagctctaaaaatcatcctatgattttatccttctactttctgaagcaaattcattagcccttcattggcctgaaaagtgacgtgacaatattttcagtaaacctgtaactgagaaaataactttccacactataaagaattaaacaagagtgaactattgtttctgtcttcactgctcaggtgtgacagcaatacctgtcattattaatttctaccatcaaaacatgtttcatccacatgtcatcttgttcatccgtcacatgtcacatgttcatctgtgttcttcacagagtaaaagccaccaccagtctgtgcgaatcggaactgcatggaaaacccaattactcagcaggtacttagaacatttcttatctgatcttttccacatgggtaaaatgtgtttctgcccttggagagcttccccgcccagtggagatgttggcgtattccatggaaaagccattttgcagagacttggtgtctgtcctgctgtggacaagtgccgttcctgggctctggtctgtgcatttctgaggagccgatgggtcctgccttgctgagaacaagcaaccgtcttccaggagctcctcagctcgcaccgtgacggcttcccccccctctaaaccccaacaggaaggagcagcagagagagcggcgttttggtgctcagggaacagactgacgctggccgatgggcacaggttcccgccagggccccatgcctgtgcctccggggtggccctgaccttgtccttgaccccaaggggggctcagggtaagtggtgccaggcagcctcccccagccctggcagctccctaagtcaccgtggaggccaaannnnnnnnnnnnnnnnnnnnnnnnnnnnnnnnnnnnnnnnnnnnnnnnnnnnnnnnnnnnnnnnnnnnnnnnnnnnnnnnnnnnnnnnnnnnnnnnnnnncctgtctgtctgtcttgctcagatggggtggcccctcggaagacagcagccttccctggagggggctgggggtctgtgggagggacgcaggaagctgacccagctccccacgccaccggcgccagccagacgggctccgaaccccgacccgtaggcgagcgcctccccagggccctcctcctcgggtggcaggccctgcagctgccccgcggcccggcttgtcttccaggcgacctgcagattgggctgctggacttcctcctgtttggcagcctcatggcggctgtggacccggtggccgtcctggccgtgtttgaggaggtccatgtcaacgaggtcctgttcatcatcgtcttcggggagtcgctgctgaacgacgcagtcaccgtggtgagcaacggagccaccgctccagagcgggcgagccgtgggaggcctgggccccgtctcaccccccatcggtcagtcagcaaaggagggcgtgaaaccctgtcctcaaactcccctcccgggggcgtcccgtccctccacctccttcctcccagctcagaacgactggcagctttcgcgaggcttctttgtatcttccacagttcccaggccctgcccgcccactccatagcttcagggttaatgatggcgctgttgaaatcccgccctcctggtccccagagcgtctgtgactttggacccacagttactgccacccattcctgagttcctaaaaaatacatgagtggccgggtgcggtggctcacgcctgtaatcccagcactttgggaggccgaggcaggtggatcacctgaggtcagcagttcgagaccagcctggccaacatggtgaaaccccgtctctactaaaaatacaaaaattagccaggggtggtggcacgcgcctgtaatcccagctactggggaggctgagacaggagaatcacctgaaaccaggaggcagaggttgcaatgagccgagatcgtgccatcgcactccagcctgggtgacagagtgagactccatctcaaataaaataaatacgtgaatagcaaacaacaaaatcccataggaaccacgtaatctgccagggccgccatgacaaagtaccgcaggtgcagtgccttgaacgacggtgggtgtcagtgtggtgggtgtcagtgtggtgggtgtcagtgcggtgggtgtcagtgcggtctggatcacggtgtcagtgtggtgggtgtcagtgcggtgggtgtcagtgtggtgggtgtcagtgcggtctggatcacggtgtcagtgtggtgggtgtcagtgcggtgggtgtcagtgtggtgggtgtcagtgcggtctggatcacggtgtcagtgtggtgggtgtcagtgcggtgggtgtcagtgtggtgggtgtcagtgcggtctggatcacggtgtcagtgtggtgggtgtcagtgcggtgggtgtcagtgtggtgggtgtcagtgcggtctggatcacggtgtcagtgtggtgggtgtcagtgcggtgggtgtcagtgtggtgggtgtcagtgcggtctggatcacggtgtcagtgtggtgggtgtcagtgcaggtgggtgtcagtgtggtgggtgtcagtgcggtgggtgtcagtgtggtgggtgtcagtgcggtctggatcacggtgtcagtgcggtgggtgtcagtgctgtgtctggatcacggtgtcagtgtggtgggtgtcagtgcggtgggtgtcagtgtggtgggtgtcagtgcggtctggatcacggtgtcagtgcggtgggtgtcagtgcggtctggatcacggtgtcagtgtggtgggctcctgcgggaccccggtcctggacttgcagacggtgccttcccgtgtcctcacgtggccgtccctgcgtgaatgtgcccgagtcgcctcctctcacagggacacgggtcctattggatcagggtccaccccggtgacctgactgtgccatactcccctttttcacgctcacatgcccaggtcctggggactttaacatgggaatttcgggggcacaatttggcccatgacagaggtgaagggagggaaactgaactggtgctaacggcagagcccggacggtgtgtgggtgtccctggaggagatggtgttccgggaggcggggacggtgcctccacagaggcccaaaggccacatcagcgctcagtaaggccaggagaagattcaggaaccccaaggaacatggttactacttcacagtgacaatcgtgacgtttcaaagccaatcccatcaaatggggccactgcctcccggaagtgagtcatggggccatccgaggggcacgtgcagagtggccctcctaggaaccgtcagtgaggccagccctgggcccggccccgacaccatcccagcccccacactgcccccgccccgtgctgcccctgcccatcctcccccagccccgaggaccctgcagacgcagccggagggaagggtggggtcagcttcctctcccctctgaaagtgcctgtggtttgaaaggtttgaaacccgtcagcctctcatgttcccttaggggttttggaaagaggaaagtcctgtgggtgtcgcacaccagacggcaagatattctcgggggaatttgggaagtgagacttaatcgggaatagagtgacagccccgtgtgccccgcagccctgcggctcccgtccctggagaagcaagagtctcccaagaggttgtcttccctcccagctggattttcattaaaaagcccagctccgagaaggccccaagagaccccgggaccctcatgggccccccaccccagcctgcatttgcaaacccaacttacacgcctgccccagggtcctctcccaccttggccagagccagagacacagagctgggtgcagagccaggttctccccaggggcctcggcccacccaggacggccctcggccggtctcacctgcgtcaccactttgctgggcgtggagcccagggcgtggataaggtttccccgcattttatctctgggttttgccgggctaaggtttaaaaacatgcaaagacggcaggggctagagccagcacagcagggaagtcactcaaactgacaccctgggtttgtctccgtagatgagactcagaattcaagtggcagggagctttgcagctgcccctgttttgcagaggataggaagaggccagctttgctcccaaagcttctggtcccctccagaacattcttttgccccatgtcttgctggctgctgggctctgggcttctcccctttgggggccattgccctgtgatgattttccttccaacggcctcgggtgccatgggctccacactcgggccaagtccagcgaggcccgggccccggagagggggtggcactaaccaaggaccacccaacgccctgcccgttttccctgcaggttctgtacaatgtgtttgaatctttcgtggcgctgggaggtgacaacgtgactggcgtggactgcgtgaagggcataggtgtgtagctgtgggtcagggggagtgggcggccgtgtctcctctggggccaactgtcttctctggcctgcagcccatgcaggaaaaagctttgcactcaaagctgctacactgggcccttctgtccacgtcacgtccccgtccagagcgattcacacacgatttgacatggtcctgggggttcctgggtgtttcccagaacagggatgagggcagccaggtcttcctgagacagacggccggatagggcctggggccaggctcccaggggcacgggagggtcctccccacttgctgaaccaaggctggtgctgagaccaggcccgatctccaagagagtgagggatccacccccgtttcccgggctcccggcacttccgcggggtcaccaggcggcccctggcaaggaagggcccggaaggccggcacggccacaaagggcgtcctctacccagtgtccttcttcgtggtgagcctggggggcacgctggtgggggtggtcttcgccttcctgctgtcgctggtgacgcgcttcaccaagcatgtgcgtatcatcgagcccggcttcgtgttcatcatctcctacctgtcctacctgacgtccgagatgctgtcgctgtcggccatcctcgcgtgagtccctcccacacacgcgagcttctccacgccctcctcccgagcttctccacaccctcctgggtccggcagggcgagccagccagggggaccccaacccgagcttctccacaccctcctgggtccggcggggcgagccagccagggggaccccaacccgagcttctccacaccctcctgggtccggcggggcgagccagccagggggaccccaacccgagcttctccacaccctcctgggtccggcggggcgagccagccagggggaccccaacccgagcttctccacaccctcctgggtccggcggggcgagccagccagggggaccccaacccgagcttctccacaccctcctgggtccggcggggcgagccagccagggggaccccaacccgagcttctccacaccctcctgggtccggcggggtgagccagccagggggaccccaactcggagggaggtgccagccgcatggacaccgggggtgtgtgtggcagaagctccgggctctgcatcaccaagttccccgtgaacccccgtgaggggaagtacaggaagtggagggcctcccctgccctctgtcctagcgcgggaccttcagagcagtgtcccgtcacctcgcccgctccgctggcgctcccaggctgggtgggaattcagtgtggggcaaagaatttatttaaattttaaaataaggagttggcgtttccactgaattgtctgtgggccgacagcagtgcccaccctgagacaggtcaggtggggagggactttggaaccctttgttgccctccctgctggcaggcagccccggtgcccattatctgcatgacggtgatgccgcctgtggcccccgcagggctgtgggcaggaaccctggcggcccagcctggctcgggaggaagaggcccccgtaaccacacaactgtgactctgggcctacaggcgccaggccgtggggggctgggcggacacgggggcctcgggcgccaggccaggtggccgtgtcctgaggcgcgtctgtccctgcagcatcaccttctgtggcatctgctgtcagaagtatgtgaaggccaacatctcggagcagtcggccaccaccgtgcgctacaccatgaagatgctggccagcagcgccgagaccatcatcttcatgttcctgggtatctcggccgtgaacccgttcatctggacctggaacacggccttcgtgctcctgacgctggtcttcatctccgtgtaccgggccatcggtgaggcggggccgggtttgcggccgtgggaccaccgatgggccggcaccgtctccgggaaggcgcaggctttctactgggcccagggagatggaggtgcagccccgtgcaaggcagaggagaggacctgatggtggcggcctcggggctggggtgggaggctctggaaccccaagggaaaccacttggtttcccactgactccactggatgtgcctcaagacagggtcagtggcacgagagatggaacgggaagcaagacagccccgcccccgcccagccccatcccccagcacccgtgtgtgtgatgcacggagcgtgggggggagacg

SEQ ID NO: 1766 - protein, 967 aa, Homo sapiens
MQFQGKLKFLFGQKKKAPSGAMLPPRLSLFCIAAPVLLPSAAEMKMRSALLRAKPRADTAATADAKDHANPGTLSSAYRHRGVSTAHGKPGLPWEFPTLEAEGTQPPGVRAGQGRPGPVCAQPCPGPGVERRCGITSSGVGPKVTALLLRPGRDPLWGCEGNRLTLADGHRFPPGPHACASGVALTLSLTPRGAQDGVAPRKTAAFPGGGWGSVGGTQEADPAPHATGASQTGSEPRPVGERLPRALLLGWQALQLPRGPACLPGDLQIGLLDFLLFGSLMAAVDPVAVLAVFEEVHVNEVLFIIVFGESLLNDAVTVVSNGATAPERASRGRPGPRLTPHRVVGVSAVGVSVVGVSAVWITVSVWWVSVQVGVSVVGVSAVGVSVVGVSAVWITVSVRWVSVLCLDHGVSVVGVSAVGVSVVGVSAVWITVSVRWVSVRSGSRCQCGGLLRDPGPGLADGAFPCPHVAVPAGPKATSALSKARRRFRNPKEHGYYFTVTIVTFQSQSHQMGPLPPGSESWGHPRGTCRVALLGTVSEASPGPGPDTIPAPTLPPPRAAPAHPPPAPRTLQTQPEGRVLYNVFESFVALGGDNVTGVDCVKGIGGPWQGRARKAGTATKGVLYPVSFFVVSLGGTLVGVVFAFLLSLVTRFTKHVRIIEPGFVFIISYLSYLTSEMLSLSAILAASQPGGPQPELLHTLLGPAGRASQGDPNPSFSTPSWVRRGEPARGTPTRASPHPPGSGGASQPGGPQPELLHTLLGPAGRASQGDPNPSFSTPSWVRRGEPARGTPTRASPHPPGSGGVSQPGGPQLGGRCQPHGHRGRQAVGGWADTGASGARPGGRVLRRVCPCSITFCGICCQKYVKANISEQSATTVRYTMKMLASSAETIIFMFLGISAVNPFIWTWNTAFVLLTLVFISVYRAIGEAGPGLRPWDHRWAGTVSGKAQAFYWAQGDGGAAPCKAEERT

SEQ ID NO: 1767 - DNA, 9428 bp, Homo sapiens
  source (1)..(9428)
  CDS (201)..(294)
  CDS (3082)..(3183)
  CDS (5501)..(5674)
  CDS (6450)..(6731)
  CDS (6872)..(7080)
  CDS (7150)..(7353)
  CDS (7391)..(7779)
  CDS (8142)..(8369)
  CDS (9093)..(9228)
  modified_base (1488)..(1587): a, t, c, g, unknown or other
  modified_base (4590)..(4689): a, t, c, g, unknown or other
cactgcctccccagtgacggtggatctcatcatatttgtcgttgtaattggtcctgatagcttccaccagcttagccaaagctcttttgtcttctgagttaacctgtgtgaaggcggcagtggtgcaggtcttcctgtggactgactacacgccccagtcttgccttccccttgataatgcagtaagggaccccccttttatgacacagtgcaggcagggagacaaccagcttgatgggatccacgttgtgtgcaatcaccaccagctgagctttcttgttctctaccaaagtggtgatggtgttaactcctgctcaaaggacagatggtctcttagtggggctgtcccctttgccagcagctttcttcttggcctgggacaaaagcctctgcttcttcacttgctttgtctctggtctgtacttatgagccagtttaagcagctgagtagctgtttggcggtccagggcctgggtaaactggttaattgcaggaggcactttcagcctatagccacttattttaaagatctcacctgaaaagctgaaggcagagaaaaccagtcaggggcagggggtgaggtgagtgctgtgaggctaatatgagtccatttcaagacgtctgctgagctggagttcaagataggtgaggatagtttagggtatactggaaagaagggcatttggtcatggaacttggcttggctactttctaactgcaggaatagggaaagtgacaaaaatttttttttttttggaggcaaagtcttactctgttgctcagattggagtgcagctggagtgcggcagaacactcatagctcattgcagccacgacctcctgggcccaagcgatcctcctgcctcagcctcctgagtagctgggaccacaggcgtgcaccaccatgcccagctaattttttgattttttttgtagagacaaggtctccctgtgttgcccaagctggtcttgaactcctgggctcaagcaatccttcgcctcagcccccaaaagtgctggaattatacgcatgagccactgtgcctggcccgacaaaaccttttttttttttgagacggagtgttgctctgtcgcccaggctggagtgcagtggcatgatcttggctcactgcaagctccgcctcccgggttcacaccattctcctgcctcagcctcctgagtagctgggactacaggcacctgccactgcgcccgccaccacgcccggctaattttttgtatttttagtagagatggggtttcaccgtgttagccaggatggtctcgatctcctgatgttgtgatccacctacctctgcctcctgaaatgctgggattaccggcgtaagccaccccgcccggccctgacaaaacccttttaaggctcactttcttcatctgtaaaatggactccacaatgaacagcagatttcaaagcttcagtgagctcacgcagagagcctggcatactataagcccccacggannnnnnnnnnnnnnnnnnnnnnnnnnnnnnnnnnnnnnnnnnnnnnnnnnnnnnnnnnnnnnnnnnnnnnnnnnnnnnnnnnnnnnnnnnnnnnnnnnnnagcttcagtgagctcacgcagagagcctggcatactataagcccccacggaggctggtttgctcctagtctgcttcctgcaggactccggtgtggagtttaggatctgggtagaagaaatggactgtctcggaatattccccccaaattgctcttctctccaaagcagcactggcaggacctgagcttcacaagccacagggatggctttggggtccagactgagacgggcatgtcccagagtccctctcccagcctccaccattccactttcctgcccggggtccccagggctgcctggcttgtgcctcagccattggatcacagcaaacacacagagaccctgagatagaagagcagggcctggagaggggaaatctgactccagtttcttgcaggccctcaagaactggagcccgtgcagtctggggcctctgctggtggcggttgcggttctccaacctgccaaatgatgagaatcatctggacaccaatgcagttttgaaggccctgtccctggggagtccagttcaaggcagctggggcaggcaggggtttgggtttgtcccggcctccaggcagtttgtctctttgggcaggcttgggagctgctgagagtgggttgaagagctagggctctctggaaccatctggatcccagcaccagcttccccactccacactactggagtggccttaggtaggtgatgtttttaacttctccgggtttcaatttcctccttggaaaatgacagaatgagatttgcagggtaagcatttagccctgggcctggcacaaagtaagcaccaacagatgttaggcaataatccatactgttattccacgcagctgtgggctgcagcagggtgaggagcccatggtgatctgagggtctcgccctcgggtctcttcactgctcaccactggggtgagctctcctctgagtcgcagcaagagggccgggctgcatccctggagtcccagctgccaccatcccgtctgagattcctctcagactcaaagggaataataagtgtgcttctctggtaatttgttgtgcctggcacatagaaatcatccaggaattgttagctaatatcatgtctgtactctttaatggacaaacatttcctggcgcctactctttgccagtcctgaactgggatgggaccacgctacatactggggctctggaaccagcctgcctgggcttgaaaccaagctctgacactgaccagctgtgtgaccctgggcaacgtactccttctttctgggtttaaaatgaatccttcatctgtttcctcacgataacccagaggtataaaaagggattcaatgggttcacttgtaaagagctcagaacagtgcctggcacgcgataaactctgtgagtgataaattaaaggcaggccacaggcccctttctccaggagctcagcctggtaggggagtcggcaaggcttagaggccacaaggctgttgcctgcggcgtagaagcgctgggcctgagctcggaatgcttcccggaggatgcgaggggcgggcgctgcggggaagacggtgctactcccgcgcgggaccgcgtgatgtttccgagtcagcggtgaaacctgcggcttccgcgcgtcctttaaaaatacaggtatttagatacacaccgtggcgtcgacttaaggtgaaatctaaacaaaatgaaaggacgggagctattctgatttggccgaacctgtgcctgcgggctgggaatgacccaaggaaacgaagggacggcggagccagtgcggcgggggccgggtgggaggcggtggcctcgtgctggggacccccagccccggctcgcctttgccgggaaccaccaagctaatttttttccctttcttttttaaataaacctaccttccttcccccattttttccttttaatatcgctgtttatctccattttttttaactgcggcgtgttcttgttcgattttaaaaaatactaaaaataaaatgagtcccctaggtgcctccctggcgccctaggcatggagagctcatgcctgcgccaccctcatctccgctggctttgccacctcggaggcgccccacacttctcctttgttttgcttttctctgagccggttgagttttcttaccctgaatgcgtcgtttatacaattagcaactgaacacagaacaaatatcaccgatataattggggtgggggtcgccatgtaaacacggggtgttgttactttaggatacttctgaccctgtcccggcctgagtcctcgctccctgactcagcatccacgcaggaaagcctcgccccagccaggcaagggcagtccctgccggctccttgagttctgccgtctacagcttgccccatcatgagcctggatgtgaggcctgagatcctcaccccactggcaagagtctgggttctgctcagcgcggcctggagccattctgtctgcatctttactggagagacatccacagtgtggcgggctctggcttcaggaacactctccccagtatgtgtcctgtgtgtttcccagctcccgttcccgcttagagactggatgatcttgaccacccacgtaacctcctcagtttcccggtctgcaaatgaagatgggttcggtgagagaactcctgtatacacttagctggggttgctggcatttggtgagccctggcagatgccagccagccgttgttagcctttgtgagcgccttgggaaagctgcaggagatcctgggtcactcagctggtcccccaagggagagtatgacacataaagagggaagtatcatggagaaatcctcgtggtataacgttaagtgaaataaatattgtttctaatgctactgcagacacctgtaaggtgaaaaaggcccacaggagtgcgggacggaggccacagcgatctggttaagagcaatacgggtcatttcggatagaagaatttcccagttgtgtgagttaggcctgctggggctgtgggctgnnnnnnnnnnnnnnnnnnnnnnnnnnnnnnnnnnnnnnnnnnnnnnnnnnnnnnnnnnnnnnnnnnnnnnnnnnnnnnnnnnnnnnnnnnnnnnnnnnnntggtctggcaactggaggagcctcagtgtgtccctccgtaagactgagacaggaacatgttaaagactcgcagcagggtcacaggcccaggaggtggaatgccagggctgagctgatcatccggctcccactcctgatggctctctctagctgccagctggcccagaccttcaggtcccttcttctactcagccaagccttgagcacagccctttcctcttccttcccacagcacagcccagaaccctgtgatggtagactgcctgcactccactgcccttgtatcctactgtgtccagtggtaacactgggtatagacagtggttgtacttagaacctcctggcatcctcccctcttccacgggcgtgtggcacttacccagagagacaccacaggcgctggcggggctgcatggttcctggtgaggcagtaggacagctcctggttgtgccaggccagcctggcgacccttactgggagtcaggggaacattgagaagcactcggttcctggctgccacaagcaatgctttggctgtgtcagggagctctcagccggatgccccaatgccccaggcctccaactcagtgcttcctgggcaaaatatcagaaaaacccatatccagtgagaaaacaaatcctcaactccctctggctttggtcccttttaaagacgtatcttaaaaagatcctgggtcagttcctcaggctctggggctggtgatagaggagctggaggtccggtcccagcacctgctgactggcgatcctggatgcgagcaaggtgtgtttgttatcctcattttacagacaaacaagagcaaccaccgccgccgccgccaccaccaccaccgccaccaccaccaccgaggcatgcagtgggcaagtcccataacaagcagggtttaaacttgatttcgctgagcctcagttttctcatctataaaatcaggacactagtaacatttgttggtcagaactatggtgaaattaaatgccctaaggaaaggacatcagtaaggttagggcttaggggctcccttgaccatgtgaatttatggggcctcaccacagctggaggtgagcaccatccgcaggacacctctctggggtccagcctcggcactcagtcccacgggcagctgatgaggccccgacgtggcatctgggggcatctgaggagcctgagaacgcttgccaagggcttgggttcttggcttttccatctggaaacaggctaaggagttcttttaagtgggatgatcacggtgctctccagctacagagggcccaggttcttttgctgtccatttaatgcccagtgcctggaaccgtgcctggcacacattaggattcaaggaggggagcttgggagcacagggaaggcggtctctgaagtgaggcatcctgaatttaaccagagttcgactagtactggctatttgctcgcaggtaagtcattaaacctctccgggcctcagcttctaaactttaggatttttttttttttggattattgaggattatatgagacaatctcagaaagtgcccgacacggaaccagtatggttccagcaagggttaggttttattagtatcaatgttatcaatttgctcagggaatgcctgtgcctgagatctgagaccagtcccgggcggccacctctctcctgcttctgaagcgccgcaagctgaaagaagcacacgtgcggggtcaacgcactctctttaatgggaaggggatcgtcatttcttacagcaataggtaaaaacataaatacgggtgggtgcgtgggcgggcgacggcgagatagcaaaggcccgggcgcccggccctggctcgcggaatgggcggccagatctcaggccctgcgtgcccgagctcagtcccagttccaaccgggggtgcccatggactctcggagggcactcctggggggacagctaagacaccaggctgcaggatcactcattgcacgctgcataatcgccgccacaaactctcccgtgcgcaagaacaaacgcgcgtgggacagaaaaagttcctaggtctccgcaggagtgaatgcaaaatccaggggactcagggtcatgttgggagccccttctccccccgagagtcagggagctgttgaggtgggatcggtcagggtcgcgccacgcgggtcccttccctaccaggctcggataccatgcagcgtggacactcccgagttgctctgcggaatcccggggctctgaaccgcattcaagtccccgacgccgaagttcacgaagttgttgttggcggcggcagtggccggctgcgctggggaaggcccggcggggtaagcggcagtgcagctgtagccagggctgcaggccgcgccgccgtaacccggataggcggggtaggcgttataaccgtagggattgaggcccacgccgtaggcaggcgcgtagggcgccgagtcccctaggcatggcttgccatcgcgcaccagcactggcaccgcgatcctgcgggcaggcggcggcggcggcgggggcagccccaccagctccagagtctggtcctgccgctgccgcttgcacttgtagcgccggttctggaaccagatcttgacctgcgtggacgtgagtttcagcacgctggccagctggtcgcgttcgggggccgacaggtaccgctgctgcttgaagcgccgctccagctcatagacctgcgcctgcgagaagagcacgcgcggcttcctccgccgtcgcgcccggggccgctccgcgttgtccgcctctgtcttctccagctccaccgccttctgcagcgcgcacagctctgagggggaacagagaggcagagagacgcttggtaagagcggcttgacctacggagcgcggccgcacagtaatggtaagggatcctcgtggaggccactgtgtcctgcctggagcgcccagctggctgcggctcactctgccaagtgcactgggagccaccgacacgtctcactcagcatttgtagaaagtcaggctggctcaaggcgctggagaacaaaacgggaggtctctgccctcggggcagttcacaccctggtgagggagacagacggtgacttaaaatttcaggctgcaaaaaaaaaaaaaataaataaaaaaataaaaaaataaaaataaaaccaggtgatgctctggggtgaactgaattagggctagtttggtttgagaagttaaatgaacagaggccgaggcctcactgctagggacggtcttatctcaaaattaaggaatcaagaaacagaaggccagggagtgttggtttggtgatcggaggctccagcctggccgcagcagggtttgcgcagtgtccaagaagctgcgggtgggcaggcggcctcggaacctgccttgctggcttcctcgaattggtagcgatcagttctagccgccgtgcccgcccgaatttgttcccaggcctctgctcctcaacaaacctatgaattctctcccggctggcagcggcccttcgcccagcgcttcgcccagcgcctgcggcctcccgggaatcgcccgggctcctgccttgggctggggggtctcccagaaggcccctttctgcagcggggccggcctccctccccgatcctgggatggcctgcgggatgatcccgcactcatctcgtccactcccttgtgcccgcggtagcgcagcatttcctaacttttccacgagggaacctctccgccctggccgcgccggcaagttgtgctgaaaaaataaagtgaagtcagattcctgagggtccgcagtatcccattttaaaatcaaggccctcgatcccagactccactttcctggcgcaaagaaagaaaggcaccagaaacccgggtcgtgggtgggctgcagaaagaaggtccaggaccctcctccgattgtacgcaaaagctgtctggtgagcaacatttcaatttctgtttagcggttctcatcagatctttaaaaagattcgtaaatccaaaggagatttaaaaacagagattatctgcttgtctctctgttctgtctaccataaaccgatttctcaacttcctaccagacccaggagcagagccgaagccgcccggggctttgttaggccggggggaaacgttttttggtctcttgcttctgatcctttcaatccggcatttcctctgaacctccgattggacgcggggcgcgggagcctggcgacaacaccaggcatcttacattctgaaccccccgccgcagcccagccctcggcccaagggcgcgtgtctcctcctcctggccctgagtttcttggggacgaaagcgacccaggaggggagaagggggcctgtgtttcctcctcacctttcttttcggctctagggtccttggctgggtcggggtcgctgtaggcacgtggatagaaggcgggggcggcgggaaaggcagacgcacacttggccggtgaaggcgcgcggcccagctctgcgcgcagctctgggaggcccggcgcagccgcctcgggcccagcgtaggcctctggcttgaaggcggccagcatgcaggaggagggcgccagggtcgcctccaggcgggcagagagctctccggcggcagccaggctgcgctgctgctgttccaggtttaggatgtctttgactgagaagggcgtgggcgtgagagcagggctggggaacatggtggcagcgccagtctcacagcgccaggtgggcggcagaaagcggcgc

SEQ ID NO: 1768 - protein, 605 aa, Homo sapiens
MTQCRQGDNQLDGIHVVCNHHQLSFLVLYQSEALGLSSECFPEDARGGRCGEDGATPARDRVMFPNKQEQPPPPPPPPPPPPPPPRHAVGKSHNKQGLNLISLSLSFLIYKIRTLVTFVGQNYAIGKNINTGGCVGGRRRDSKGPGARPWLAEWAARSQALRARAQSQFQPGVPMDSRRALLGGQLRHQAAGSLIARCIIAATNSPVRKNKRAWDRKSSDTMQRGHSRVALRNPGALNRIQVPDAEVHEVVVGGGSGRLRWGRPGGVSGSAAVARAAGRAAVTRIGGAWLAIAHQHWHRDPAGRRRRRRGQPHQLQSLVLPLPLALVAPVLEPDLDLRGREFQHAGQLVAFGGRQTCACEKSTRGFLRRRARGRSALSASVFSSSTAFCSAHSSEGEQRGRETLGKSGLTYGARPHSNGKGSSWRPLCPAWSAQLAAAHSAKCTGSHRHVSLSICRKSGWLKALENKTGGLCPRGSSHPGEGDRRPLLLNKPMNSLPAGSGPSPSASPSACGLPGIARAPALGWGVSQKAPFCSGAGLPPRSWDGLRDDPALISSTPLCPRHVDRRRGRRERQTHTWPVKARGPALRAALGGPAQPPRAQRRPLA

SEQ ID NO: 1769 - DNA, 1383 bp, Homo sapiens
  source (1)..(1383)
  CDS (201)..(386)
  CDS (512)..(1183)
  modified_base (1290)..(1383): a, t, c, g, unknown or other
ggtcgctgttaccgagcggctggttatgtgtgaaaacttcagtaattgccatgatagcctcttaaacgggggtgtttaacaaatcgtcagcggcatcagaagatgcgctacctgcttggagtgcaccgggtgctgtttccatcaaacgatccagcgccgtatcggtacgcatctgggcactttgcggtgcagcagccagaatgcgctgtgcgctctctaccgtcatacccggcgtttcggccagtgctcgcgcctgtgactcacgccctttagcctcgtcgcagttcaggatgcccatgatgcgactattctctgcagctactgctgcagtaacctgcgcactgacatctacaggggctgctacggaagcaattgtcgtgtcaacggtagtggcctgttcagctgatgcagttgtctgagttgctgcctggtcaactggcttagtggtcacagctgatgcagaaggtgatggcatagttcctccaagggttgtttttttgcgtctgtcgagtgcttcgcgcatcacgccgagcgcatcggtattgttaacaagttcatccgccagcccgttatccaaagattcctggccggagaatactgccgcttcggtgtccagcacgtcctgaacagacatgccggtataagcggaaaccttttcggcaaacatctgacgagtggcatcgatacgcgtctggaaatcagcacgcacatctttcggaagcttttcgtaagggttgccgtcgaccttgcgatcgccgctgtaaatcagcgtgacctcaacgccgttagttttgagcgcagcgccatagttactgtgcgccatcatgaccccaatggagccggttctggccgtttgtgtgaccagccgtcgcgatgccgaactggcaataagctgacctgcactgcagttcatgtcattggccagcgcccagatgggtttgatatcgcgcatacgggcaataatgtcggcgcagtcaaacgccccggacaccattccacccggcgtatccatatccagaagaatgccgtcaacgccggggtcactgattgcctgctgcaggcgagcaatgatcccgttgtaacccgtcatcccggaataaggctgaagcgcacgggttttactgaccagcgtgccggaaaccggcaagaccgcgataccatttgccacctgatagctgcgtgatggacggggatccatgtcatcatcctcaccaaacagcgccagcggttcggctatttgtccggcatcaagcgtgatgccagagacggtatctgtcagccgggtgatgnnnnnnnnnnnnnnnnnnnnnnnnnnnnnnnnnnnnnnnnnnnnnnnnnnnnnnnnnnnnnnnnnnnnnnnnnnnnnnnnnnnnnnnnnnnnnn

SEQ ID NO: 1770 - protein, 285 aa, Homo sapiens
MRCALSTVIPGVSASARACDSRPLASSQFRMPMMRLFSAATAAVTCALTSTGAATEAIVVSTCFAHHAERIGIVNKFIRQPVIQRFLAGEYCRFGVQHVLNRHAGISGNLFGKHLTSGIDTRLEISTHIFRKLFVRVAVDLAIAAVNQRDLNAVSFERSAIVTVRHHDPNGAGSGRLCDQPSRCRTGNKLTCTAVHVIGQRPDGFDIAHTGNNVGAVKRPGHHSTRRIHIQKNAVNAGVTDCLLQASNDPVVTRHPGIRLKRTGFTDQRAGNRQDRDTICHLIAA

SEQ ID NO: 1771 - DNA, 2149 bp, Homo sapiens
  source (1)..(2149)
  CDS (201)..(236)
  CDS (1218)..(1410)
  CDS (1438)..(1949)
ttggtctctggaactagacactcactctctggtctcttcccccacttccccttcactcctttactagccctctgtcaccatttcagatggccacccctaatgcagagacttctggacatttatttagtttcttctccacagaaataaacttctagagcctggagcaaaatagtggctgcgccatttgtgtgtcagatgagatgaccctggctcgggccatggaggtggcaattgaggtgtgagaaatggtcagatttaggataaattttgaagaaagagtcagtagaatttctgatggattggattagggtgtcaaagagcattccaaaatgaccccgattttgatttttacttattttaaaaagaaaacctataatagaacattggagagccagtattgaccttttcaaataaaaacaaaattattcaaaagctttttcttactagtactattcaaatcgggtaccctatgtggtaccaatattatattctaggaaatactgacggttttggaaatttggaggaaaaagcatcgagaagagctccaattacttagaaaagagagtccaggagatggggtggtgtatataagcctatggatggtgtctctgcaactcagtggccccgcctgtccaggggctgggtccccacgggatctccctccccacaaggaggtggagaggctatgtgtcttgaacaactggggttgcgatccagtgtatgggcagtcccactcctggaactccagggtgggcactcgctccatttccacaggccctcaagggttccaggattgccccgtgggaggggttttagtgctgcatctagtaagaagctgtaagatgctcagaaacatgttttgaagctactttgcacagaaagaagactcttcattcagatttgtattacagatcaataaaagtagctaagtcgtatctgaagatgtttttgtttacactttgtatgtgacagaaaacctccagttgtctgtgtcaaggacaattacttaattttattacaatgtatactgatttggttagtggaagcttctagcgcctactgtggtggtggtgggagctatctgattcccattcccaggcctggccatcgacgcgaaggcctccagctgatcggaagtcggcgttggccggcgcggagcccggcgcggaggcttctttcagccgcccgggcaagacacccctccctcggtcccgcagcggtcactccgcctctggcgcgcatgcgccgaccccagcgggcgtcctcccgggctccctctccctccctccctcatccgggtcctgggcgagcgggcgccgtgcgcgtgtcccgcggccgagctgctaataaagttgcagcgaggagaagcgcagcgacggcgtcgggagagcgcgcctagccggctcgcgagtgagtgagggtccccggcgcgcgcgggcgaggggaactgggggctgcaggctctgccccggcggactcgggccgaggcgggggcgttcggccgcggacggagcggaaacgacccagggcctgtcgggcgggaggtaggccgagtcctggcctgccggggtcccggctggcggacacggtgcggcccagcggctgcggaggcctcgctggctgcccggggcgtcctgaggcggggccggggctggccctcgtcccagccccgctgttaccgcccagactttggagggaggcgtctgggacgccctggaggggaccccctgaccccgcgctgtcctggggagcggtttgctttcctaactcatcggatgtaccaccctggatacacacccttgataggactgcggtgctcggccgggcagcctgggctgctgcactgcgaagctgtccaatggcttgatgaatccgtgccgccgtcgctttgtgtttcaaagataaggatccgcgcttatcggtgggaattacactctgggcagttgtgaccggctactgcaatcagctggtagttagacctggtttctgccacttgccatgtcagttttcaccactgcaaggatttcttctacttcatgtaaacttctctgtgctgcaaagagaatgccaaagcagcgtctttttgccttcaccatattcagccgctggccgggtcctatacttcaatatcagggctcaaattaatatt

SEQ ID NO: 1772 - protein, 246 aa, Homo sapiens
MTLARAMEVAIERSLRLWRACADPSGRPPGLPLPPSLIRVLGERAPCACPAAELLIKLQRGEAQRRRRESAPSRLASEGNWGLQALPRRTRAEAGAFGRGRSGNDPGPVGREVGRVLACRGPGWRTRCGPAAAEASLAARGVLRRGRGWPSSQPRCYRPDFGGRRLGRPGGDPLTPRCPGERFAFLTHRMYHPGYTPLIGLRCSAGQPGLLHCEAVQWLDESVPPSLCVSKIRIRAYRWELHSGQL

SEQ ID NO: 1773 - DNA, 910 bp, Homo sapiens
  source (1)..(910)
  CDS (201)..(710)
tccccagccataagcaaacgggggatgtttccacacggggcccagtgttagtcacattatttctgcctccatataacttaagggtacaactaagaactgcaactcttgattaaaatgacacacattccagacttctgagaagctttcctacagaagaattcctgcatggcatatgggaaattggatttgaggtcatctaaatgattcctttcctacatggagagtctattgttttattactcaggcagcgagcttcttcagaactccttgtcataggaattcaagaatacctatgtgggtatcaacagcactctttggagaagcagacacagaaagatatgcacaacataggaatgactcttttttttttttttttttttttttttttttccagagagagagtgagtctggctctgttgcccaggctggagtgcagtggtgtgatcatagctcactgcagtctcaacttcatgggctcaagcaatcctcccacctcagcctcccaagtagctgggagtacaggtgcacaccgccatgcttggctaattttttacattttgttttgttttgttttttgtttttgtttttgttttaagatggagtctcactctgttgcccaggctggagtgcagtggcgcaatctcggctcactgcaacttctgcctcccgggttcaggcgattctcctgcctcagccccccaagtagctagacctggctatttttttttttttttttttgtatttttagtagagacagggtttcactatgttggccaggttggtctcgaactcctgacctcaagtgatcctcctacctcagcctcccaaagtgctgggattacaggcatgagacaccacgcccggcctaatttttcaatttttagcagggacagagcttttgctatgttgc

SEQ ID NO: 1774 - protein, 169 aa, Homo sapiens [sequence omitted]

SEQ ID NO: 1775 - DNA, 871 bp, Homo sapiens
  source (1)..(871)
  CDS (201)..(671)
tttagctgcattagacttcaaagcgtttagaccagtttctccatcttacggagcggtgaacgggctcaggaatgtggagcgtttcctggcgtcaagcaggtcaaagtcagcgctgctttttttacagacactgcttttcttacagtcttcggttagttcagattgtatacctctcctgaagatgtcacccaaaacctcctatgggattctgccgtgatcatctctccactcatcccacaccaacgccaaagagatcttttaaaatgaacttccatcaggtcacttcccagggcccatcattgcgtgttcttttcctgattcattcgaatgcacccgtcctcctgatcaatttttattccacagggtgttgttttgttttgttttgttttgtttttttgagacggagtcttgctctgtcgcccaggctggagtgcaatggcgggatctcggctcactgcaagctccgcctcccaggttcacgccattctcctgcctcagcctccccagcagctgggactacaggcgcacaccgccacacccggctattttttttttttttgagacgcagtctcgctctgtcgcccaggctggagtgcagtggcgcgatctctgctcactgcaagtccgcctcccgggttcacgccattctcccgcctcagcctcccgagtagctgggactacaggcgcctgccaccacgcccggctaattttttgtatttttagtagagacggggtttcaccgtgttagccaggatggtctcgatttcctgacttcctgatccgcacgcctaagcctccgacagtgctgggattacaggcgtgagccaccgcgcccggcctgttttgttgtttttttttttgacactcgctc

SEQ ID NO: 1776 - protein, 156 aa, Homo sapiens
MGFCRDHLSTHPTPTPKRSFKMNFHQVTSQGPSLRVLFLIHSNAPVLLINFYSTGCCFVLFCFVFLRRSLALSPRLECNGGISAHCKLRLPGSRHSPASASPAAGTTGAHRHTRLFFFFLRRSLALSPRLECSGAISAHCKSASRVHAILPPQPPE

SEQ ID NO: 1777 - DNA, 1036 bp, Homo sapiens
  source (1)..(1036)
  CDS (201)..(836)
agagatctgttttccaattatgaagccggtcggtttggtcagactcccgacacccacgtcccaggtacccggtgggaaagtggcagtgcgagggcgcagccattggtggttgcagggccccagagggctggggtgacctggcatcccggggctccccacgggctggatgacggggttggcactgtggcgtccaggaggagatgcctggttctgcccaaaataatccaaagagccgtttcctcctcgcccttcagtttttgcctgaggtgctgggtagcccatcctttcctctgtcccagattcaaatgaggagtaagagcccagacgagaggaaggcaggctggatctttgccttgagagctccgtgtcaccaggatggaagggggtgcctctcggaggagcctgtgtccacctccagtctcggctttccccggggggccaagcgcactgggctgccgtctgtccccagctcccgtggccacacagctatctggaggctttgcagggagtcgtgggttctcgcacctgctcagccctgtgtcggcttcctgtgtgctcacctaaagctgtggttttgctgtgttcacttcgatttttctggtctgtggagaaactgtgaattggagaaatggagctctgtggcttcccacccaaaccttctcagtccagctggaggctggagggagacacaggccccacccagcagactgaggggcagaggcacaggtgggagggcagcggagatcagcgtggacaggagcgatgcactttgtagatgctgtggctttgtgttgcgttttgtgtctctgttgcacagatctgttttttcacactgatccgtattcccctgggtgtgcacacagggcgggtgtggggcatttaggccatgctgtgctctacttcattgagtaaaatcgagtgagaggttccgggcagcaggatcgacgcccagtccagccggcagagggaacacacgggtccttcattgtcctgtaagggtgttgaagatgctccctggcggcccccaagcagacta

SEQ ID NO: 1778 - protein, 211 aa, Homo sapiens [sequence omitted]

SEQ ID NO: 1779 - DNA, 7513 bp, Homo sapiens
  source (1)..(7513)
  CDS (201)..(364)
  CDS (4230)..(4434)
  CDS (6642)..(7313)
catttctccaagttgggatgcaggcttcccatgccactccgaaggctgtgaaatgtctcttcaatgcattccttgacaccttggccagccggggtgaagggacagtgggcaaagggctccagccagggaccatggcccacgctgagatggggctgtcttgctcgccactgaggtcagcttagggatgcattgggactctgatggccgggactttagtggcggggtatggcctggcctttcagttgtctctcccaaggcacatatgtccctccctgtctggcctgcaggaactgggggtctattttggggagtgcagtgccgccttgggtcacaacatcctggagcctgtagtaaacctggccaggtaagtgctgcccgccccccgccgcccccacccaccccttgcagaatcctctgggacagctccggccccactcttgactcccaggtgggacaggaaggcccattctgaggaaatgggtcagggaagcacctagttaaagacctgggctcaccagtctgaggggagagagagccctgcactgagagtctcctgactccagctctgcccttcccgttcgctgaatcactccccacaggcacttaggctctctgagcctcagttttttcatttgcaaagagggctgagaaaaggagtgtctctcttctgctcccaaacttccagtagcttccattaaaatccaaatgctttgcaatggcctgcagcatctctagtgccatctcccccacccctacacacacacacattcactcacacccacacacactcacactcttacacacatacactcacactcacacacacacacttgccaagttccagccactcagagactccctccctgatcacccacctgccatcactattttggatcacagcccctgtttgtgtccttcatggcccttcttgacacgacacatattaatgatatatgcatttatctgttttcttgttgtccaggaaggcagggccatgtctgttttgttcagcccctctccccatacctgggacctaggtgctccataaatgaataaaatgagtaaggcatgaggggagctagatcagatgagcaccatctggcacacagtaaatatatcacgaagaaatgaatggacttcttttgcttccccagcctccaagctctctcggcactgagccgcgccatagccctctgcttgggatgcacctcccccaccctttctgctggcataccttgtccatggctcagttcggtcaccatctccttcctccccagatccctccaggacctggtgtgaagtccctgtgtgcctccccatcattcccgggctgcagtcaccccttttcctgtctgtctctctcactactcaagggagggaatggtggcttctttgtcatagtcagagtcctgcacagtgcctggcacatagtaggccagaaagagaaggtcaaagtctcagtgactcaattcttcgggtctcatgtggaatgcagggcaggggcagagctgttgtgggggttgtgggtgcggcctcccaccccccagctgcacccatgggcccatccgtgctgcccgtaggaggtgagagagaggcctgatgcctggcactgtcacataggtcactcaggatgcaagaagaaggcctgaaggactcgctggtgaaggtggcccccaagaggccgcccaagagattcggctgttgctcctgatcacctgtcctgtcctgggtaggatggacacccatggggtttcctgtccctcagctcctgtcctttgttcctggacagcaacgacacagaggaccagcttggaggttcaggaaaacccttctcaactcaggactcggatcccagagcagggccgcatcacctctgcctttcacactccaaaggagggctttgctgagtgaacaaggcttgaggggcaggggtatggcaaaactctccaaacaaagaaagtctagaaaaacgacttaaggaaaatacaccaaaatattggccgcacatctgtgggtgtaaaattttagggagaatgtggggggggtggggtgttactttccattttacacatatttgtattttcagattttcaacaataacagtattcaatacataatcagaaaaaagagatgtggaggaggaggagagaaacttcccaaggagctcccttgggtgctgctggctcctaattagtgtaacctgttaatcacatgttgctcggtgttagagcggtccctctgtgctctgcctggcagggcgctgttggcctggtctccctcactatttctatttgcaagcatgggctttctttccagcagaatctggttcctgggaagagtaatgttccaaaggcctctgatatgcctcgatgccctcctgtcttccagagccccaacctcactccctttccccaccatacaaaacacacctcccaggggtcacatttgggggtcccgccccctgctccaatgccatggtgtccccaagcacagggctttggcctgagttgtcagtctctggatgcatttgaggggcagctagggtgtggctggggggtccaagcagctggggagccgagactcagaatcattcacacacttctatttggagcttttgtggaagtttccagaattccataatattcacctcctgaatggtggctgccccttatcagccagggctggggtttccagtgccctcggagagcttgctttagagtcttggagagacggccatggtctgcgtttgtatgtctgtcacatcttaccatcatcacaaattgaatatacaacatgtgccaggcactgaatttgtttgtttgttttttgagacaggatctctctctgttgcacaggctggagtacattggcatgatcgccactcacaacagcctcaactgtctgggctcaagtgattcccccacctcagcctcccaagtagctgggaccatgggcacatgccaccacatccggctaattttttagctatttgcaaacacaaggtcttgcaatgttgcttaggctggtctcaaactcctgggctcaagtgatcctcccaatgtgctgggatgacaggcgtgagccaccgcccccagcctgggtttggtattttgtaatccttcaggtactggggaatttcctggctgaatcaatggaaaccccagtttcatagggggacaagcaaagacagttcaaggaacagagttacagagagagagaacgaaggagaaagagggagcaacagagggctgttgcatcacacagtcttagaccctggccccaacccctcttctcagttctgaaaggaacgtctcagcagcagtgagccttccatcaccagaggcgcacaagaagacaggtaatgcttggcaaaggtgaggtagagaagatcccagcatctgaagctgccaaagttggattagattcccttaatggaccccattcaacctccagactccatgtggatgattcccatggtccagctgattctttgtgtgtttttgttttgttttgttttgttttgtttttttgagacggagtctcactcagtcgctaggctggagcacaggggcgcaatctcggctcactgcaacctccacctcccgggttcacgccattctcctgcctcagcctcccaagtagctgggcctacaggcgcccgccacctcacccagctaattttttgtatttttagtagagacggggtttcaccatgttggtcaggatggtctcgatctcttgacctcgtaatccacccgcctcggcctcccagagtgctgggattacaggcatgagccaccacgcccggccctccagctgattcttttactgggcccttcactgatcctttttaccccaacgtcttctcccatctcaggtcccctcccgcagcccacaagcctgcccctgaactgagcagtttctcagtgtgctcagagagagagagagagagagagagagagagagagagagagagagagagaggtgtgggctgcagtgagtgatgctggccctggataaggatgggaaacaggtcctatagttgctaatggctctttctctggggcccagggacctggcaggcaccaacatctctgtcctgtgggccagggagttaatgaggcaggtaggcagggtgtgattcctgggagaggcagtagagcagacagcccctgtcgtttgggggcccggtacgggagtggcccccaagcctccccgtctcagctcagctctgttctggcctcaggcaactcaggttcgcaggaggtggagttctgggaggaactccacactgcccagcaccctcttttggctttcttgggccggatccacctgctgggcagggcacagctgtgcaaggaccaccagcctttcctgctgtcaaagggctcacaagccagggaacaggacccaggaacctcagagcagcacaaagtaggcaacgacagcagcaggagaaacttgaggtagacttcagagtgaacttccaggcaagtggtgagttcttggggcatgtcagccaaggaggctctgatttaggcttagccagagtctgattaagaaaaggagggtgggactgggctgatgggactcaggctgtggagtgagaagggagggcatggggagagaaggaaggctgggcaggagctctaagagaagagggcttttgggaactgagggtgagcaggggcagaatgacatccctcctttacccagtgcctaccgtatgccaggcactgttctgagcacctagctcgtgttaattcatttagccctcacaccatcaggcgtgctcccccatcttacggaaaaggaaagtactgcatagggaggctgagtaacttccccgtagtcacgtagcaagtaagtgctggagccagtgttaaacgcaaacgccgatacccatagacttaactctgaagttctgcaactgcttacaggaagatgcggatgcttcggggaaggaggggccaggtccctgaagcctcgtattgctccctgccaattcctctccagtaatagtccatgtcattggtgggtgtggaccaggaaaaagagacgaaaaggcagtgataaatgccaggaaagtggctggatgacagccttcatccaggacaggtccttcatttcccctcctcctgccgtctctgaagctggtgggacccgggaaggtggccgacatcagaattcacagaggccccctctccagtctcccctcagctgccctcaggcacgttgctgccctggggccccagagacgaagccaagttccccaggctggggctctgcaggagggactcagagactccttcaaacctggctttgagcccgcaggagaagagtgtctccagcccccaccccggtgtggtagaaaaggggagggcaactccagtaaggactcctctgctatgtcttgtttgctgctggattccgggaacctggtccagagcaaatgctcaggaaatatgtactgagttagcaggcaagcctccagctaaagctcccgggccctggcctggcctgcagggcggccaatggtgacatcagccactgggctggctctaggatgtctacatcccatcttgtagccagagtcctcccaatcggggactccccctgcccttgacatgtgggacagagtgggggtgagaagaaaggtctgaccactgggtgcagactcccccactctgccaggggcctgcacagcataacctagagggcaatgattcccaggctggtctgcccttagaattatttgggatctttcaaaaatgctaaagcccagaccaactatgtcatgtctctgggggtgggacccaggcttctgtatttgtgaaactcctcaggtgatcccaaagtgcagagaagcttgggaaccactggaaggggcttcacaccttctcaaagccctttcagacccacttttccatttgaacctcaaattaaacctgcttgtttcacagggcagggtttttgttttgtcaaaaaatagatacatatgtgtgtgtgtatgtatgcacatatatatttatcagattatgaaaacagtgtgtactccctgcagaaattttagaaataaattttaaagaagaaaatgaaaattaccctagtcttaccacttatgatagttactattgacatctgttttattttatttccttgctttcttacagctgaggaaactgaggtagagaaacattaagtaactctcccaggggccaggtgcggtggcgcctgtaatcccagcactttgggaggccgaggcatgagaatcgcttgaacctaggaggcggaggttgcagtgagtcaagatctcactccagcctgggtgatagagtgagattctgtttctaaaaaaataaataaataaataaatcccagggtactggagctagcaagcagcagaggcaggatttgaacccagggtactaatggagtccatcccatggggttgtcatgaggtctgcaggggctaatgtgtgccaaggacaggccttatctgggcccactacatgcagggggtctgtgaaaaaaggaggcttagcaggaatggggaaggcggcctttggggctggctggtttctactttgtccttgtgtgtttgaaacagaatggagcccaatgctacgttcaccacgcagctcacggccacacctgagcgactgctccgactcatctctgctggggtctgtggcctcatcctgctggtggggctgtcagctaatgggctcatgctgctggtggtgggccggggcccgggctccccccacccgctccactccctgacccacagcctcatgatgaacatcacgccatctgacctgctcttcctggcctgcgtggtgcctgtgctgctgctgagcttcctgcagcacaactggtggctgggccctgccatctgcaccattagccaggccaccaacacagccaccacgttctgcatcttctatagcatggtggccacagctctcctgcgccatgtggctgtggcccggcctgacctggccttcccagccggctggggcaccctcttgctgctctgtggggccatgtgggccctgggccttacagaatccctgcccaactggctgttccagagggtggcagtggaggaggagacagcgggggctcccaagacccaggcctgcctcttgctcctgagccctgctgggacctcctgctacatcagcctgctgggagccctggccttcctgccatgcacgctggggctgggctgctctttcagccacgtgggctggctcctgtggacccagccccaaggtcccatgggagagagcatccaggagcattaagagaacatagggctcagccttgtggtgctggtggtttttgtgctgatgtgggggccctgctccatgctgggttatgtggcagccatgggctacctgcctgccacaccggctgcttttgtggcctccagcctctgcaccatcctggcctactccaattgcgctgtcagccctatcctctgcttctacctctcccgcccctt

SEQ ID NO: 1780 - protein, 346 aa, Homo sapiens
MAGTLVAGYGLAFQLSLPRHICPSLSGLQELGVYFGECSAALGHNILEPVVNLASSVLASGNSGSQEVEFWEELHTAQHPLLAFLGRIHLLGRAQLCKDHQPFLLSKGSQAREQDPGTSEQHKLTATPERLLRLISAGVCGLILLVGLSANGLMLLVVGRGPGSPHPLHSLTHSLMMNITPSDLLFLACVVPVLLLSFLQHNWWLGPAICTISQATNTATTFCIFYSMVATALLRHVAVARPDLAFPAGWGTLLLLCGAMWALGLTESLPNWLFQRVAVEEETAGAPKTQACLLLLSPAGTSCYISLLGALAFLPCTLGLGCSFSHVGWLLWTQPQGPMGESIQEH

SEQ ID NO: 1781 - DNA, 1390 bp, Homo sapiens
  source (1)..(1390)
  CDS (201)..(1190)
gatggtagtgatggtaataggggtgatagtggtgatgtggtaatgatggtggtggtggcagtggcggcggtggtggtgataatgatagtggtaacaatggtggtggtgatggtggtaatactggtgatggaggtggtcgtggtgatgatggtggcagtagtgatggtggtagtgatagtgacagggtggtggtggtggtgatggtgataggggtggatagtagtggtgaaggtggtggtgatgatgacagtggtggtgacagtggtggtggtgatgttagtgatagtggtgatggtgatgggggtggtagtggtgatggtggtagtagtagtggtggtggtggtgatggcagtgacgggggtggtggtgggggcagtggtattggtggtggtggtgaaggtggtggtggtgacggtgatgatgatggtagtgatagtggtgatggtggtggtgatgatggtgatggggtagtagtggtgttggtggtagtggtggtggtgatggcagtgatgggggtggtggtagtcgtggtggtggtgacagtggtagtagtgatggtggtagtgatgggggtggtagtgatggtggtgctggtggtagtgataggggtggtagtgatggtgatggtgatagtggtgatggcagtggtagtgatggtggtgatagtgatggtgatagcagtggtggcagtggtggtgatagtgatggtgatggtggtggtggtgatggtgatagtaatggtgatggcaatgaaggtgatggtgatggtgatggtgatagtgatggtgatggtggtggtggtgatggtgatagtaatggtgatggcaatgaaggtgatggtgatggtgatcagtgatggtggtgatggtgatggcagtggtggcagtggtggtggtggtgataatgatggtcatggtagtggtggtgatggtgatagtgatggtgatggcagtggtggcagtggtggtgatagtgatggtcatggcagtggtggtgatggtgatagtgatggtgatggcagtggtggcagtggtggtgatggtaatagtgatggtgatggcagtgatagtgatagtgatggtgatggcagtggtggtggtggtgatagtgatggtgatggcagtggtggtggtggtgatagtgatggtgatggcaatggtggtgatggtgatggtgatggtgatcagtgatggtggtggtgatggcaatggtggcagtggtggtgatggtgatagcgatggtgatggcagtggtggtgatagtgatagtgatggtcatggcagtggtggtgatggtgatagtgatggtcatggcagtggtggtgatggtgatagtgatggtcatggcagtggtggtgatggtgatagtgatggtcatggcagtggtggtg

SEQ ID NO: 1782 - protein, 329 aa, Homo sapiens
MVIGVDSSGEGGGDDDSGGDSGGGDVSDSGDGDGGGSGDGGSSSGGGGDGSDGGGGGGSGIGGGGEGGGGDGDDDGSDSGDGGGDDGDGVVVVLVVVVVVMAVMGVVVVVVVVTVVVVMVVVMGVVVMVVLVVVIGVVVMVMVIVVMAVVVMVVIVMVIAVVAVVVIVMVMVVVVMVIVMVMAMKVMVMVMVIVMVMVVVVMVIVMVMAMKVMVMVISDGGDGDGSGGSGGGGDNDGHGSGGDGDSDGDGSGGSGGDSDGHGSGGDGDSDGDGSGGSGGDGNSDGDGSDSDSDGDGSGGGGDSDGDGSGGGGDSDGDGNGGDGDGDGDQ

SEQ ID NO: 1783 - DNA, 1402 bp, Homo sapiens
  source (1)..(1402)
  CDS (201)..(1202)
aacaacatccctctaagtttcctgccagaactttttatgcgctcgctttgggatagatctaggcaaagagctggatgctttgtgaaggaaaggtcctggcttggaacgtacatttacctttctgcactgggtggcaaccaggtctttagattagccaactagagaagagaagtagaatagccaattagagaagtgacatcatgttgactctaactcgcatccgcactgtgtcctatgaagtcaggagtacatttctgttcatttcagtcctggagtttgcagtggggtttctgaccaatgccttcgttttcttggtgaatttttgggatgtagtgaagaggcaggcactgagcaacagtgattgtgtgctgctgtgtctcagcatcagccggcttttcctgcatggactgctgttcctgagtgctatccagcttacccacttccagaagttgagtgaaccactgaaccacagctaccaagccatcatcatgctatggatgattgcaaaccaagccaacctctggcttgctgcctgcctcagcctgctttactgctccaagctcatccgtttctctcacaccttcctgatctgcttggcaagctgggtctccaggaagatctcccagatgctcctgggtattattctttgctcctgcatctgcactgtcctctgtgtttggtgcttttttagcagacctcacttcacagtcacaactgtgctattcatgaataacaatacaaggctcaactggcagattaaagatctcaatttattttattcctttctcttctgctatctgtggtctgtgcctcctttcctattgtttctggtttcttctgggatgctgactgtctccctgggaaggcacatgaggacaatgaaggtctataccagaaactctcgtgaccccagcctggaggcccacattaaagccctcaagtctcttgtctcctttttctgcttctttgtgatatcatcctgtgctgccttcatctctgtgcccctactgattctgtggcgcgacaaaataggggtgatggtttgtgttgggataatggcagcttgtccctctgggcatgcagccatcctgatctcaggcaatgccaagttgaggagagctgtgatgaccattctgctctgggctcagagcagcctgaaggtaagagccgaccacaaggcagattcccggacactgtgctgagaatggacatgaaatgagctcttcattaatacgcctgtgagtcttcataaatatgcctctgattcttcaggaatacaactctgattcctcacaaagccttccaatttcttctataaaacacaattgaaagtctctccactttgtatcaatgaactcacttatagatgaataaaataattaagcactatacatggcctagg

SEQ ID NO: 1784 - protein, 333 aa, Homo sapiens
MLTLTRIRTVSYEVRSTFLFISVLEFAVGFLTNAFVFLVNFWDVVKRQALSNSDCVLLCLSISRLFLHGLLFLSAIQLTHFQKLSEPLNHSYQAIIMLWMIANQANLWLAACLSLLYCSKLIRFSHTFLICLASWVSRKISQMLLGIILCSCICTVLCVWCFFSRPHFTVTTVLFMNNNTRLNWQIKDLNLFYSFLFCYLWSVPPFLLFLVSSGMLTVSLGRHMRTMKVYTRNSRDPSLEAHIKALKSLVSFFCFFVISSCAAFISVPLLILWRDKIGVMVCVGIMAACPSGHAAILISGNAKLRRAVMTILLWAQSSLKVRADHKADSRTLC

SEQ ID NO: 1785 - DNA, 1324 bp, Homo sapiens
  source (1)..(1324)
  CDS (201)..(1124)
aatttgcatcctgtctgagccaagagcacacctctcctctttagcctgagcatcctcctctctaagtgagctctggttcagatgcagagcctgaccactctttagcactcctaggaaagattaaaaacaggactgtggctaggggcagggaggaggccagggaccaaggcactcaagtggggactgcaggaggggtcagaatgcaagcagcactgacggccttcttcgtgttgctctttagcctgctgagtcttctggggattgcagcgaatggcttcattgtgctggtgctgggcagggagtggctgcgatatggcaggttgctgcccttggatatgatcctcattagcttgggtgcctcccgcttctgcctgcagttggttgggacggtgcacaacttctactactctgcccagaaggtcgagtactctgggggtctcggccgacagttcttccatctacactggcacttcctgaactcagccaccttctggttttgcagctggctcagtgtcctgttctgtgtgaagattgctaacatcacacactccaccttcctgtggctgaagtggaggttcccagggtgggtgccctggctcctgttgggctctgtcctgatctccttcatcataaccctgctgtttttttgggtgaactaccctgtatatcaagaatttttaattagaaaattttctgggaacatgacctacaagtggaatacaaggatagaaacatactatttcccatccctgaaactggtcatctggtcaattcctttttctgtttttctggtctcaattatgctgttaattaattctctgaggaggcatactcagagaatgcagcacaacgggcacagcctgcaggaccccagcacccaggctcacaccagagctctgaagtccctcatctccttcctcattctttatgctctgtcctttctgtccctgatcattgatgccgcaaaatttatctccatgcagaacgacttttactggccatggcaaattgcagtctacctgtgcatatctgtccatcccttcatcctcatcttcagcaacctcaagcttcgaagcgtgttctcgcagctcctgttgttggcaaggggcttctgggtggcctagatggcatggtttccttatctagacccccggaaaagaaaggtgaggatggcagagctgtggcccactgacatggaggtgttttcataggtagatgaatactgggtactgttatggggctcctcctctgggaagcggaggagacaaggaaatctgggaactctctgagcatgcttcccttctttggaatgttataaagatgc

SEQ ID NO: 1786 - protein, 307 aa, Homo sapiens
MQAALTAFFVLLFSLLSLLGIAANGFIVLVLGREWLRYGRLLPLDMILISLGASRFCLQLVGTVHNFYYSAQKVEYSGGLGRQFFHLHWHFLNSATFWFCSWLSVLFCVKIANITHSTFLWLKWRFPGWVPWLLLGSVLISFIITLLFFWVNYPVYQEFLIRKFSGNMTYKWNTRIETYYFPSLKLVIWSIPFSVFLVSIMLLINSLRRHTQRMQHNGHSLQDPSTQAHTRALKSLISFLILYALSFLSLIIDAAKFISMQNDFYWPWQIAVYLCISVHPFILIFSNLKLRSVFSQLLLLARGFWVA

SEQ ID NO: 1787 - DNA, 1520 bp, Homo sapiens
  source (1)..(1520)
  CDS (201)..(673)
  CDS (855)..(1320)
gcagtgagtcgtgattgtgtcaccgccgtccagcctgggcaacagagtaagaccccgtctcccctaaataaaataaaatgagataagtcctcatttgctagagatacacagaatatggtgtagtagattttctctaactgactccaccctcaaccctggaaaacagggaggggtggcaggggagacggatggagtgaaacatgagccactgcagagtgatgggtggccatggccgatggcgtccgtgccgttatcttctctgcggagcaatggggggccgtggcgatggcatccgtgccgttatgttctctgcagagcgatggggggccatggccgatggcatccgtgccgttatgttctctgcagagcaatggggggccattgccgatggcgtccgtgccattatgttctctgcagagcgatggggggccgtggccgatggcgtccgtgctgttatgttctctgcagagcaatgggtggctgtggccaatggcgtccatgctgttatcttctctgcagagcgatgggtggctgtggctgatggcatccgtgccattatcttctctgtggagcaatggggggccgtggccgatggcatccgtgccgttacgttctctgcagagcgatggggggccattgccaatggcgtccgtgccattatgttctctgcagagtgatggggggctgtggctgatggcgtccatgctgttatcttctctgaagagtgatgggtggctgttgtcttctccgcagattgatggggggccgtgccgatggcgtccatgtcgttgtcttctctgcagagcgatggggggctgtggctgatggcgtccatgctgttatgttctctgcagagcaatgggtggccgtgccgatggcgtccatgccgttatcttctttgtagagcgatgggtggccatgccgatggcgtccatgctgttatgttctctgcagagcgatgggtggccgtgccgatggcgtccgtgccgttgtcttctctgcagagcgatgggtggccgtgccgatggcgtccgtgccgttgtcttctctgcagagcgatgggtggccgtgccgatggcgtccgtgccgttgtcttctctgcagagcgatgggtggccgtgccgatggcgtccgtgccgttgtcttctctgcagagcgatgggtggccgtggccgatggcgtccgtgccgttgtcttctctgcagagcgatgggtggccgtgccgatggcgtacgtgccgttgtcttctctgcagagcgatggttggccgtggccgatggcgtccgtgccgttatcttctctgctttcgtgtatgtttgaacatttctataataaaaacttaagtgaaaagcttactgtgctggctgcctggaggtgtggtgtttctgttcattttgtttttagggtgggaagtagtgggattgggggtccatgggggccatttcttgggttttcctgaagtgggttctgtgcttggcatcatgaagcaagtggagcgtgtgtttgctccatgcctgtgg

SEQ ID NO: 1788 - protein, 312 aa, Homo sapiens
MSHCRVMGGHGRWRPCRYLLCGAMGGRGDGIRAVMFSAERWGAMADGIRAVMFSAEQWGAIADGVRAIMFSAERWGAVADGVRAVMFSAEQWVAVANGVHAVIFSAERWVAVADGIRAIIFSVEQWGAVADGIRAVTFSAERWGAIANGVRAIMFSAEAMGGRADGVHAVIFFVERWVAMPMASMLLCSLQSDGWPCRWRPCRCLLCRAMGGRADGVRAVVFSAERWVAVPMASVPLSSLQSDGWPCRWRPCRCLLCRAMGGRGRWRPCRCLLCRAMGGRADGVRAVVFSAERWLAVADGVRAVIFSAFVYV

SEQ ID NO: 1789 - DNA, 1024 bp, Homo sapiens
  source (1)..(1024)
  CDS (201)..(824)
gcagtgagtcgtgattgtgtcaccgccgtccagcctgggcaacagagtaagaccccgtctcccctaaataaaataaaatgagataagtcctcatttgctagagatacacagaatatggtgtagtagattttctctaactgactccaccctcaaccctggaaaacagggaggggtggcaggggagacggatggagtgaaacatgagccactgcagagtgatgggtggccatggccgatggcgtccgtgccgttatcttctctgcggagcaatggggggccgtggcgatggcatccgtgccgttatgttctccgcagagcgatggggggccatggccgatggcatccgtgccgttatgttctctgcagagcaatggggggccattgccgatggcgtccgtgccattatgttctctgcagagcgatggggggccgtggcgatggcgtccgtgctgttatgttctctgcagagcaatgggtggctgtggccaatggcgtccatgctgttatcttctctgcagagcgatgggtggctgtggctgatggcatccgtgccattatcttctctgtggagcaatggggggccgtggccgatggcatccgtgccgttacgttctctgcagagcgatggggggccattgccaatggcgtccgtgccattatgttctctgcagagtgatggggggctgtggctgatggcgtccatgccgttatcttctctgaagagtgatgggtggctgttgtcttctccgcagattgatggggggccgtggcgatggcgtccatgtcgttgtcttctctgcagagcgatggggggctgtggctgatggcgtccatgctgttatgttctctgcagagcaatgggtggccgtggcgatggcgtccatgccgttatcttctttgtagagcgatgggtggccatggccaatggcgtccatgctgttatgttctctgcagagcaatgggtggccatggccgatggcatccgtgctgttatgttctctgcagagcaatgggtggccgtggc

SEQ ID NO: 1790 - protein, 207 aa, Homo sapiens
MSHCRVMGGHGRWRPCRYLLCGAMGGRGDGIRAVMFSAERWGAMADGIRAVMFSAEQWGAIADGVRAIMFSAERWGAVAMASVLLCSLQSNGWLWPMASMLLSSLQSDGWLWLMASVPLSSLWSNGGPWPMASVPLRSLQSDGGPLPMASVPLCSLQSDGGLWLMASMPLSSLKSDGWLLSSPQIDGGPWRWRPCRCLLCRAMGGCG

SEQ ID NO: 1791 - DNA, 1538 bp, Homo sapiens
  source (1)..(1538)
  CDS (201)..(399)
  CDS (450)..(1007)
  CDS (1301)..(1338)
tatgttctctgcagagtgatggggggctgtggctgatggcgtccatgccgttatcttctctgaagagtgatgggtggctgttgtcttctccgcagattgatggggggccgtggcgatggcgtccatgtcgttgtcttctctgcagagcgatggggggctgtggctgatggcgtccatgctgttatgttctctgcagagcaatgggtggccgtggcgatggcgtccatgccgttatcttctttgtagagcgatgggtggccatggccaatggcgtccatgctgttatgttctctgcagagcaatgggtggccatggccgatggcatccgtgctgttatgttctctgcagagcaatgggtggccgtggcgatggcatctgtgccgttatgttctctgcagagtaatgggtggccatggccgatggcgtccatgccgttgtcttctctgcagagcgatgggtggccatggccgatggcgtccatgccgttgtcttctctgcagagcgatgggtggccgtggccgatggcgtccgtgccgttgtcttctctgcagagcgatgggtggccgtggccgatggcgtccgtgccgttgtcttctctgcagagcgatgggtggccgtggcgatggcgtccgtgccgttgtcttctctgcagagcgatgggtggccgtggcgatggcgtccgtgccgttgtcttctctgcagagcgatgggtggccgtggcgatggcgtccgtgccgttgtcttctctgcagagcgatgggtggccgtggccgatggcgtccgtgccgttgtcttctctgcagagcgatgggtggccgtggcgatggcgtccgtgccgttgtcttctctgcagagcgatgggtggccgtgccgatggcgtccgtgccgttgtcttctctgcagagcgatgggtggccgtgccgatggcgtccgtgccgttgtcttctctgcagagcgatgggtggccgtgccgatggcgtccgtgccgttatcttctctgctttcgtgtatgtttgaacatttctataataaaaacttaagtgaaaagcttactgtgctggctgcctggaggtgtggtgtttctgttcattttgtttttagggtgggaagtagtgggattgggggtccatgggggccatttcttgggttttcctgaagtgggttctgtgcttggcatcatgaagcaagtggagcgtgtgtttgctccatgcctgtgggctgcgtggaggcagcctgacaaacacatttcgaggggccccggggggtcgctgaggctgtgtatgtctgttccatgcaacagccgtcatctctgtttttgaacacattgacagtgtgtagtctgcttggggggatgttcgaggtcaacagagtggccaaaagaggctctctcgtcattgcaatgatccacactccactctgctgtcactgaacctgcccccaagcctgcaccctcttcatctcttctttgtctatagcaaccatccccaatcctgacatcagtgattgtgtgtgttgtgtcttgtctgtcctccatagca

SEQ ID NO: 1792 - protein, 264 aa, Homo sapiens
MGGRGDGVHAVIFFVERWVAMANGVHAVMFSAEQWVAMADGIRAVMFSAEQWVAVAMASVPLCSLQKRWVAMADGVHAVVFSAERWVAVADGVRAVVFSAERWVAVADGVRAVVFSAERWVAVAMASVPLSSLQSDGWPWRWRPCRCLLCRAMGGRGDGVRAVVFSAERWVAVADGVRAVVFSAERWVAVAMASVPLSSLQSDGWPCRWRPCRCLLCRAMGGRADGVRAVVFSAERWVAVPMASVPLSSLLSSVISVFEHIDSV

SEQ ID NO: 1793 - DNA, 1063 bp, Homo sapiens
  source (1)..(1063)
  CDS (201)..(863)
  modified_base (214): a, t, c, g, unknown or other
ccttcctgggtttgctagcaaaagtccacgattgaagctccttggcatggccaggatcatgtgccgaaccctgagtgaatcaatatggcctggaaaacaaagatctggctggccaggtcagggtcccgtgtgcctgcctgcagcagtgggatagctgttcagaaggagcccttctagcctacctgtggctgtctacacacatgcacacacagcngtcacacagtgcactcaaaaacacaggcacatgcacacacgcacacacgcacacatatgcatgcacatgtacacacgaatgcacatacagccacacacaaaagcaagtacacatgcacacagacgtacatgtgaatgcaggcacatacacgaaccatgtaaacatgaacatgcacacacatgcacacaaatacactacacccacccaaacgcactcttgcacacgtacacaaatgttggcacatacatgtgtgcacatgcatccatgcacatgtgcacgcacacatgagtacacgtgcatacacacgcaaacacgtgggcgcacacacgaacacacgtgcacacacacgaacatgtgcacaagtgtaggcacatacacgcatgcacatgcatccatgcatgaacacacatgcacaaatgcacagatgaacatgtgcacacacaggcacatacacatgacaggacccagtgtgagaagtgagggtggttcaggcaggctggcaaggagcccccaacgtgctgtagatgtggggcaggagcacctgcatgttccagtaggggtcagtggtgtctcaggcagcatttccaaagctgctctagaatggagtttcaagtctctcttgtccaggtgcagtggcttaagtctgtaatcccagcactttgggaggcccaggcgggaggatcacttaagcttgggaggtcaaggctgcagtgagctatgattgtgccactatactccaacctgggcgatagtgtgagaccttgtcttgaaaaaaataatagttttagccgggcgcagtggctcacacctgtaatcccagcattttgggaggcccaggcaggaggatca

SEQ ID NO: 1794 - protein, 220 aa, Homo sapiens
  MOD_RES (5): Variable amino acid
MHTQXSHSALKNTGTCTHAHTHTYACTCTHECTYSHTQKQVHMHTDVHVNAGTYTNHVNMNMHTHAHKYTTPTQTHSCTRTQMLAHTCVHMHPCTCARTHEYTCIHTQTRGRTHEHTCTHTNMCTSVGTYTHAHASMHEHTCTNAQMNMCTHRHIHMTGPSVRSEGGSGRLARSPQRAVDVGQEHLHVPVGVSGVSGSISKAALEWSFKSLLSRCSGLSL

SEQ ID NO: 1795 - DNA, 43419 bp, Homo sapiens
  source (1)..(43419)
  CDS (201)..(278)
  CDS (8419)..(8609)
  CDS (10482)..(10594)
  CDS (19132)..(19408)
  CDS (41900)..(42106)
  CDS (42300)..(42393)
  CDS (43094)..(43219)
  modified_base (20434)..(20533): a, t, c, g, unknown or other
ctttttttttttttttttttgacagggtcttactttgtcacacaggctggagtacagtggtgtgatcacagctgactgcagcctccatctctgaggctcaagtgatcctcccgcctcagcctcccaagtagctcggaccgtaggcaggcatcaccatgcctggctaatctctgtatttttagtagagacagggtttcgccatgttgcccaggctggtctcaaacgcctgggctcaagggatccgcccgccttggcctctcaaattgctgggattacaggtgtgagccactgtgcccagccaactgccatttctttcagggcccagggaactgaggcagaatgctgtacatagccattgaagcaaatgccagttaattcatgctccttgaatgagggtcaaacacattagtgcacagagcctgcaagccagagcggaaccttgcctacctttccttccttagctgctctcactggcccccttggctgcctgtgggctggccatgttggccttttttgggtttccgtctctttgtgcaccttctctccggcttcagagactttgcataggctgttggtcttggaattccctactctcggcccacaggccacgcttagggagcccttcctttgatggcccagatgaggtcagcccttgcccatcttgtgctattataattccatgtgttataggcattatagggtctttctttattaatttctttgtttttgttttttttttagagatagggttatgctttgttgcccaggctggagtgcgatggcatcatacatagctcactttggccttgaattcctgggctcaaggggtcctcccacctcagcagcctgagtactggggactacaggtgtgtgccactgagcccagctaattttttaaatttttgtagagaccggattttgccatctttcccagactggtctcaaactgggtgcaagtgatccacctgcctcggcctcccagagtgccgggattataggtgtgaaccaccatgcctggccaataaggccctttcttcacagcatgggtcgtgagtaaatgcatttgtgattaggtgactagtgtcttcctcagacctcactggactgtaagcatcgtgagatctcctttgctccccatctaatacagggcctgggacacagtagatttttgttaaatacttgttgaatgaatgaaggaggcatcttaaaattcagaaaagcagaaatccacatttgctttctaaatcctgttattgcattgcatctcagttgtgatgtattcattcactcagcagatatttatgcatccttgcagtgtggcagatattggtgtaggctggggaattcagtggtaaatttatagacagaatctctggtgagggaaacaaacaataaacataaacaacaattactattaactagtgaaaagtggtgcggggaaggagatggacagtgactctactggggttgctgggagactgttaaagacagaccactgtacttccccctgtccctagcctgggacagtctcagtttatgtttgtttatatttgttgaagtatcttgatttgggcaataaattatatggtcactccagttacagacagaatatagacatggtgtcagggaggtctttctttttctctttttctcttttttttttttgagacagagtttcactcttgtcgcccaggctggagtgcaatggcgcgatctcagttcactgcaacctccgcctccccggttcaagcaattctcctgcctcagcctcctgagtagctgggattacaggcacccgccaccatgcctggctaattttttttgtatttttagtagagatggggttttaccatgttgtccaggctggtcttgaactcctgacctcagatgatccaccggcctcggcctcccaaagtgctgagccactgtgagccaccatgcccagcctgtcaaggaggtttttctaaagaggtgatatttgagcagaggctagcgtaaagagaagcaacgaattctgccccttcaattagaaggtctgcaggaagagcaagcattgcccagggagaagctcggagtgttgggaactagaagaaagtccagtgtggctggagtcaagtggttttccttaaggagtttggagggttttaagttgggagctgcatgttctgagaccaggaaaagccaagagccacaaagttgtattgaaccaatccaaggaatggatgggcccagaaacaaaacctttattattcccatgtaataatttcttaacagatttattgaggtggaatgtatatacaataaattttacatgtttaaaatgcatgctttaggcatggtagctcatgcctgtaaacccagaattttgggaggctgaggcgagaggatagcttgagctcaggagttcgagacctgcttgggcaccataatgagaccctcatctctataaaaagtagaaaaaattagttggacatggtggtgcaaatctgtagtcccagttactcaggaggctgaggtgggaggatcgcttgagtctgggagatcgagactgcagtgagccatgatcgtgccactgtactccagcctgggcaacagagtgagacctgtttcaaaaaataaataaaaaataaaatgcacactttgataggtttggcaaatgtgtgcattcattaagccatcaccacaatcaagattgtaaatacagccatcacccatttttttgtaatccacctttctctcttgcacctctctgtacccctactccctcccaaccctcccaggcaatggctggtctgccctctctctagattagtttatcgtttctgagattttatatatatgcagtcatacattatgttttttttttttttttactgactttttttacttgagtaattatttggaaattcatccatgttatatcatttatcagtaattattcctttttagtgctgagtagtgttccattgtatggttataccatggtctatccattcgcctgctgatgggcttttaggttttctttctttcttttcttttttttttttttttgacagggtctcattttctcacccaggctggaatgcagcaacttgatcgtggctcaccacagccttaacttccctgggctcaggtgatcctcccaccttaactgggactacagatgcataccaccaccacatctgactaatttttttttttttttgagatggagtctcactctgttgcccaggctggagagcagtggctcaatctgcgctcactgcaagctccgcctcctgggttcacaccattctcctgcctcagcctccctagtagctgggactacaggcgcccaccaccatgcccagctaattttttgtatttatagtagagacagggtttcaccatgttagccaggacggtctcgatctcctgactttgtgatccgcccacctcggactcccaaagtgctgggattataggcgtgagccactgtgcccagccaatttttttttttaatatagatatggggtcccattttgttgccggggctgatcttgaactcctgggctcaagcgatcttcctaccttggcctcccaaagtgctgagatgacaggcatgagccactgtacccagcctgtttccagtttttagctattacaaataaagctactatgaacattcatgtaaaagtctttgaatgaacatatgctttcatttccaccttaggagtggaatggactgggtcatatggtagacatgtgtttaactttttaaagaggctgcaaactgtttttcaaagtggttctgtcattttagatttccatcagagttgtatgagagtttcagtttctttacatcttcactaatacttggtaggatcagtctttttgacttgagccattccaaaatatatgtggtggtatctcctggttttcattgcatttcactaatgacttaatgttgagtatcttttcatgtgcttatttgccatctgtatatcttttttggggaagggtctattcaacctttgaacatgttttattgagtggttttcttactgtggcgttttgagagttgtttgttctccatataggcctttatgagatacatgatttgtagatatttcccccagtctgaggcttgtcttttcattctcttaataatatcttttgaagaacaaaagttttaaatgttgatggtgagtttatcaagttgttttcatgagttgtgcttttaatgtcatatccaagaaatatttgcctaataatccaaggtaacaaaagtgtcttctctattttcttgtagaagtattgtagtttttggttttatatttatttctattatctattttgagttaatttttatatatggtgagactatgggttgaggttcatttttttgtaaatggatattcattataccagcaccatatgttgaacaagattatctttgcttcaccaatacctttgttgaaaattagctgatcaaatgtggatctatttctggactctattctgtcccattgttctagttgcctatcttgacaccactatcacaccatcttgttatggtagctttataataattcttgaaataaggtagtattagtctaccaattttgttcttttctttttctttcttttttgagacaggatcttgttctctcacccaggctggagtgcagtggcgcaatctcagctcactgcaacctctgccttccgggttcaagcgattctcctgcctcagcctcccgagtagctggaattactggtgcccgccaccacactcggctaattgttgtatttttttaatagagaccgggtttcactgtagtggccaggctggtctcaaactcctgacctcaggtgatccacctgcctcagtctcccagagtgtgaggattacaggcgtgagccattgcacacagccggttcttttttcctaagtccgcttttccatgtgaattttggaatcttctacaaaaagatgagaactttgaaaacagtgtcaaacctttatctcccatcctttgtgtttccatatgaattttagaatcagtttgccaattttttacaataagatgagaacttcaaataaaaatgtcagacttttatgtgaattttaggtcccaaaccattttaaagattaaaacacatacattaagtcaagtgtgtttggcatgcaaaaaagtacaaagacataaagaaattgagacccaggccaggtgtggtggctcacgcctataatcccagcactttgggaggccgaggcaggcagatcacgaggtcaggagttgaagaccagcctggccaacatggcgaaaccccgtctctactaaaaatacaaaaattagccaggcgtggtggcaagtgcctataatgccagctattcgggaggctgaggcaggagaatcacttgaacctgggaggcagaggttgcagtgagccaatatcatgccattgcactccagcctgggcaacaagagcaagactccgtttcaaaaaataaaaaagaaagaaaatcaagacccaaagtctttaagagcttctggtaaaatgtacatcccgtacctcatggggctgttttaccaggagaatgcagttacataggattttcatgtggattctctcagagaagccaggccactgcattgcaagatacgtctcatcttcattcccgggttttgtatctaggaatgtactctatttcacctagcaaaaatgtatttcagcagttttttttttttagacggagtctcactctgtcaccaggctggagtgcagtggcgtgatctcgactcactgcaacctccgtcttccgggttcaagagattttcctgcctcagcctcctaagtagctgggattacaggtgcacgccaccacacctggctaatttttgtatttttagtagagacggggtttcaccatgttggccaggctgatctcgaactcctgaccttgtgatctgcccgcctcagcctcccaaagtgctgggattacaggcgtgagccagcgcgcccggcctattttagtagttgtaacacatgaactatgttcctctttgtctagcttgggacattttttgaccgcaatgctgtgaataggacatctattttatataaatgcttaccccttgcaggtgtccttgaacgtttataccttcctctcctctcccttgcctacaagagacattttttaataatatacttccattggttattttctgtatgtgtgggtcagaggacatagagaagttcaactcagttttgtgcagttctagcaaatataaatgtaaaaccaaaaactataacccttctagaagaaaatatagaagatgcttgttacttgggttaggcaaagatttcttgggtatgacaaaagcacaatccatgaaaaacaggttgacaagctcaaaatgtaatagtttatttccagattaggatggtatccatttattttcccagagaacactgaccttatggggtagtcatggaaagagaatagacaccgagcctggtggacactggtttctgcatgctgggtagcctaactgagcccctacatttccattttgaaggcaggaataatacatagaaatacagctctgagtgttggtggtgttaaagatgatggcacaggccgggcacagtggctcaagcctgtaatcccagcactttgggaggccaagatgggaagctcgtttgagaccaggagtttaagaccagcctaggcaacatagcgagactgtctctaccaaaaataaattagccagaaatggtggctaatgcctgtggtcccagctacttgggcggctgaggtgagaggatcgcttgagcctggaaggtcagggttacagtaagctgagtttgtgccactgcactccagcctgggtgacacagcaagaccctgtctccaaaaaaaaggaaggtgatgacagtcatcatttattgagtatttgtctcacatcagacatggtgctaagtgtctttttttttttgcggggaggcggggggaggcagagtctcgctctgtcccccaggctggaatgcagtggcgtgatctcggctcactgcaacctctggctcctgggttcaggcgattcttctacctcagcctcctgagcagctgggattacaggcgcttgccaccatgcccagctagtttttgtatttttagtagagacggggtttcaccttattggccaggctggtctcgaacttcctgacctcaggtgatccacccgccttggccttcccaagtgctgggattacaggcgtgagccaccgcgcccagcctatgctaagtatcttatatttgtatctcacttaaacctcatgactgcttaatgaggtagagattacttgtaaaacaagtgccaacatacatatttgcatcctgattatcaaacttgttttaaatttaatgtgtattatgaaaatttccaaacataaatgaaaataaaatcataaactaaatcctcatatagccatttctcagattcagaaataattaggattttgccacatttgctttatctgttttttctgggtcgggggcagcgggggagctgagtgttttaaagcaaacctcaggccttctttcatttcatccctacagatttcagtgtgcacttcagaaacgtgtggacttcttcttctgtgatttgctgccattgtcagacctaatagaattactaataattccttgacatgatcagatttccctgattaactcaaagacatctttttgcagcttgttcaaataagaatgcaaacaagggccacagcttgcattacgttgggtctcttttaatcagggtgcttaataaacatttgtcaaattagattgcgtgtgactttcagaaattattataattctgggtcagaattaaactttgctctcaaaaggcagttctagttgcattaattgttttcgtttgccaaagggggtttgtcatttagagaagacaggacgatgcaaactgtttgttgtggctgctattttgacttatttccttttaggaattttttttccttgttcaatacagaaatactgaaaatgataccaagtttataaaaactaactcggcctggcaagatggctcacacctgtaatcccagcactttgggagtctgaggtgggcagatcacttgaggtcaggagtttgtgagcagcctacccaacatggtgaaaccctgtctctactaaaagtacaaaaattagccgggagtgatggggcacaccttgtaatcccagctacttgggaggccgaggcaggaggatcacttgagcacgggaggtggaggttgtagtgagccaagagcatgtcactacactccagcctgggtgttgggagtgaaaccctgtctcaaaaaaaacaaaaaccaaaaaactaacttccctcctcccatatttatatttgtctttgaaagccagctaaagggaaaaaaggaaaaggccagggcaagtctcatgggaagaaacagaagaaaccagaagtggacattctcagccccgcggccatgctgaacctctactacatcgcccacaacgtcgctgactgcctgcatctgcgaggcttccattggccgggtgctcccaaaggaaagaaagggagaagcaagtgacagcatttcacaacacatctctgttacagacaacaggacctggggaagagaagtcaggataacacaactgttgccagcaacatagactttactccagacgacttgagatgcaaattaagtgtgcttttctgtgatggtggaagatcaggaaatgcaccttacttcctctgttatgccagatatggttagccactttggttttttaggagctataggatgggaaaagcctgagtaattcctacacagtgtgctgaaattaatagaactttcagaaattattataattctgggtcaggattaaactttgctctcagaaggcagttctagttgcattaattgttttcttttgccaaagagcgtttgtcatttagagaagacacggcaagaaacactgggtttccttaggaacattcctctcttgggcaccatttccttttttttttttaatggaaaataataaatactttgtttctataattttcttctcagcagtctgactctgtttgatttgaattagccacaggctccacggatgctaagatggtcacgaatgctctgaccctgccagtcttgcaagcagatggtgagaagtggctgacagtgtgaaatggctggatgcagggcaaagggggcaaatctgcccatccctttcttttttcttttaagacggagtctcactctgttgcccaggctggagtgcagtggcgaaatctcagttcactgcaacctctgcctcccggtttcaagcgattctcctgcctcaggctcccaagtagctgggattataggcgcacgccaccagcccaggctaatttttttatttttagtagagatggggtttcaccgtgttggccaggctggtcttaaactcctgacctcaggtgatctgcccgcctcggtctcccaaagtgatgggattataggcgtgagccactgcacccgcctcagtctcccaaagtgctgggattacaggcatgagccactgcacctgcctcagcctcctaaagtgttttattacaggtgaaagccatcgcacctggccatccctcttttttccatatttcacctgactcttctccctccttccctccacactctatttcgtcccaccttctgcctactttgttaaaacttggctggccccgagttatagaattggtgccaggcacttacttgccctgggcattcggctgatattctagatctccctagccctgtaaggagacgcctaagaggtgaaactatagttctttctcctcggcccagaggcctaaattctccagatgtgaaagccagcgttttgcaagtgcggacgccgtctttgactccctgagcactccatccttgcctcctgctctgtcttcctggctcttcctgcccctcctcagcccctgcaccgttgtctccattcatggttctgagcccaaagctgacacactgtaggcagcacctccggggatgttctagtttgttggaattataattatgctccaggtggccttgtgaggatcgcaaggattcatgaggtttgctaagggaagctgcaactcaggactcaggatttcatacacatcagagaaaaaaaggaagctccatgaatctctgtgctagagaagtggggtgcccatgacccacgtgagcctgttgggaacaatactgtttacctgcaccatctgtgcagtttccatagaagcccttggccagttgccagaggagccctcacttgggtgaatctgaagggaggtctcctctgctgtgttttctggttttggagacggggagcaccttcccaccctgttaaggactgctgaactcactaactccagttcagcagttctcacacttgagtgtgcctctcggtcacctagaacacttggccaagtgcagattgctgggccctaccctcgcaggaaggatggggctcagggatttgcgtttctggtacgctggcaggttatgctggtgctgcccagccacacaggtagagagctgccgctccagttaatgctgcctacccagaagctaaaaggcttagtggaatccgaacctgtgggatgtgtaatgtcctttcctgcctcacctgggttcaggagcgtgtatttgagtagctggttattggaagtttggggagaaggcagctgcaaagcttccttttgatccctgactgcccgcacctgcaaggcttccattggccgggtgctcccaagggaaagggagaagcaagtgacagcatttcacaacacgtctctgttacagagaacagggcttggggaagaaaagtcaggataacacagctattgccagcagcacagactttactccagacgacttgaaatgctgctcatctgtagcacagatacaggcatttacaggctaacaaggtctgaaagtggtcatgctcttttcttttgagatgatgaaatgatgagccaggactgtgagtgctgggatgggggaagcactggtctgattggccggggcaccgtgactcaaggctcaccccagtttagcagactgcctgaggctgtctcagtattgtgctcactggacccctggggttctgagagaagccataagaaattttgggttctaatagccatgctctagtgttaccacatatacataaagtcataaacattacacacacgctatataaaggttatgatgcattttactttttgagaattttttttttattttggtgaaacgctaaaaacttttttcaacaaaagctatttcaatacattaattgagcatctactgtgcttggcacaaagacagcaagacagaatccctactgataagatttggctgtgtccccggccaaatctcatattgaattgtagctcctgtaatttccacgtgttgtgggagggttttgtgggagataattgaatcacggcggcagttttccccatactgttctcatggtagtgaataagtctcacgagatctgatggttttataaggggtttcccctttcacttggctctcattctgttttgtctgctgctgtggccgtgtgagatgtgcctttcaccttccactgtgattgtgaggcctccccagccacgtggaactgtgagtctgttaaacctctttttctttataagttacctagtcttgggtgtgtctttatcagcagcatgagaacagacaaatacacttaccctcaaggagcttccagtctggtcaagaaggctactacccagattaacagagggcaactaagtttctatttcaactttgataaagtacattcatgatgcaatttatgaaggtgattaagaggagggtgggattaagacctctggaggacatccggaggatatctgatgataaaatatatacttgaaccctgctgtttttacttcccctaaactcaaattggcaagaatcctgattcttgctgcttttaaagattcaaagaggagcttgtgaaaggcacagtgtattaggtcattttgcattgctataaagaaatacctgaggttggccgggagcggtggctcacgcctgtaatcccagcactttgggaggccaaggcgggcgggtcacaaggtcaggaggtagagaccatcctggctaacatggtgaaaccccgtctctactaaaaatacaaaaattagccgggcatggtggtgggcgcctgtaatcccagctacttgggaggctgaggcaggagaatggcgtgaacctgggaggcagagcatgcagtgagccaagatggcgccactgcactccagccttggtgacagagcgagagtctatctcaaaaaaaaaaaaaaaaaaaaaaaaaaaatacctgaggccaaggcaggcggatcacttgaagccaggagtttgagaccagcctggccaacttggtgaaaccccatctctaccaaaaatacaaaaattagccaggcatggtggtgtgtgtctgtagtcccagctactcaagaggctgagtcaggagaatcgcttgaaccagggagggagaggttgcagtgagatgagatcgcaccactgcactccagcctgggcaacagagtaagactctgtctcaaaaacaaaacaaaacaaaaaacaacctgagcctgggtaattgataaagaaaagaggtttaattggctcacagttctgcaggctgtacaagcatgacaccagcatctgctgggcttctggggaggccttcaggagcttttacttttggcaaaagggtgcaggcacaccacatgcctagagcaggagcaaaagagagaggagtgtggggaggtgccacatactttttttttttttttttttttgagaggaagtctcactctgtcgcccaggctggagtgcagtggcgccatctcggctcactgcaagctctgcctcccgggttcacgccattctcctgcctcagcctcccgagtagctgggactacaggcgcccgccaccacgcccggctaatgtttttgcatttttagtagagacggggtttcaccgtgttagccaggatggtctcgatctcctgacctcgtgatccgcccacctcagcctcccaaagtgctgcgattacaggcgtgagccaccgcgcccagccagtgccacatacttttaaacaactagatctggaaagaactcactatctcgagaacagcaccaatccatgcaggatccatccccatgacccaaacacctccaccatgccgcacctccaacactggggattacaattccacatgagatttgggcagggacaagtataagcagtgataggtacgtccacatacaggtcatgagggctacctggaggaggcaacagctgaagtgaaggccttgctgtgaagctatgggggctttttatgaggaaggctctatgcaagggtgaggatggatatggggcttgatggttagaaagtgggagagaaggccaggtgcagtggctcacacctgtattcccagcactttgggaggccgaggtgggtggatcacctgaagtcaggagttccagaccagcctggctaacatggtgaaaccccatctctactaaaaataaaaaaattagccaggcatggtggcgtacacctgtaatcccagctactcaggaggccgaggcagaagaattgcttgtacctgggaggtagatgttgcagtgagccaagattgtgccattgcactccagcctgggcgacaggaggagactccgtctcaaaaaaaaaaaaaaaaaaaaaaagaaagtgggagagaagggaacggtgactgcaggaatagaaaaaatgtccacagaggaggaaggaggacatggcagtcacatgtggatggggaattttccattacaaatctgatgatagaatccaaagagacagtgacaagtgtcagcgagggtgggaaaaattgcaaccctcatgcgttgctggtggggatataaaatggagccgctgtggaagacagtttggcagccactcagaacgtaagtagagttaccatacagctcagcaattctactcccaggtacacgcccagagaactgaacacacggtcacacaacatcttgtacataagccaagtacagcggtgctcgcctatagtcccagctactcaggaggctgaggccagagggtatcttgaacccaggagttcgaggccagcctgaataacacagcaagaccctgtctcaaagataccaaaaaaacaaagcaaaacttacatacaaatgtttattacagcattcttcataatagccaaaaagtgaaaacaacccaaatgcccatcaacaacagataaaatggggtctctccatacaatggaatattatttaaacataaaaaggaatgaaatggtgatatgtgctacaccgcatagatgaaccttgaaaacaccgtgctaagtgaaagacgccagatacagaggccacatattgtgtgattccatttagatgaaatactcacacagacaaagccctagagacaggacgtggattagtgagtgccagggggaaatgagaagtagtggctgctaatgggtctttaacctttgggtccttttttgcgtggtaaacatgttctggaattcaatagtagtgacggttgcataaccttgtgactctactaaaaaccactaagctgtacatttaaaagggtgaatttgatggtatgtgaatcatgtctcaagctgatgacaactagaaaaggtccaacaagactgagagagaaagaggaggcaagtcccagataccagagcaggtggccccaacagagacgaggccacggaagagggaacagggcccggtcagacccctgcagccagatcctgggacagagaaacttgggagctgtggcaggagggaccacagacccaaggtgtctgcagacctgagggaggactgacgatgttcctgccagggctgaactcatcttaaaagaaaaaaaaaaaaaaggccgggcacggtggctcacacctgtaatctcagcactttgggggactgaggtgggcaaatcacttgaggtcaggagtttgagtccagcctagccaacgtggtgaaaccccatctctactaaaaatacaaaaatgatccaagtgtggtggtgggcgtctgtaatcctagctgctcgagaggctgagacaggagaattgcttgaacccggaaggtagaggttgtggtgagctgggatcatgccactgcactccagcctgggtgaccgagtgagactccatctcaaaaaaaaaaaggactacaataaattccatctctaacaacttttttttgagtcaaggtatcactctgtcacccaggctggaatgcagtggtgtgatcatggctcactgtagccttgacctcccaggctcaagcagacttcccacttcagcctctgagtagctgggactataggcatgtaccaccacgcctggctaattttgtttattattattttttttagagagacgagctctcactatgatgcccaggctggtcttgaactcctgggcttgagcgatcctcctgcctcaggctcccaaaatgctgggatcataggcatgagctaccacacccaggcctccaacaacttcttatattttgttttattcttttagtttatcccttatttatttatttaattcattagtaataaagccaatcaaactttttaaaatgtgccattttatcctggaatacatcagtatccttgatgatgatgatgatgattattattattattattagttttgagacagggtctcgctctgtcacccaggctgcagtccaggggcgtgatctcagctcaccacaacctctgcctcccaggttcaggcgattctcctgcctcagcctcctgagtaactgggaccacaggcgcgtgccaccatgcccggctaattttttgtatttttagcacagacgggatttcaccatgttagccaggatggtcttgatctcctgacctcatgatctgcccccttcggcctcccaaagtgctaggattacaggtgtgagccactgcacctggcctctttgatattttaaacaggtagctttgcactctaactccaggcatgttcctgctgtgatttgtgttactctgtggctgtctgtcaagggcccaccttgctgggagagatgtggtttccactcttgctacacccttctcctctcccccaataccctccagcgacctctgttttgacaaatctgggcatggccctgtctcccacctccattctgctcccattctgtcctctctttttgttctcgttttccttgtttgccatattccctgaatacaaaatcaccagggcttcactggcttcatggtaaatccctctgcaggtctcaactccaaggtcacttcctcggcaacatcttctcatggtcaggcccactgtcttagtcccttcccgctgctatgacataatacctgggcctggataacggatcaaaacagaaatttacttctcacagttctggcagctgtgaagcccaaggtcaaggtgccagcaggttcagtatctggtgagggctgctctctgctttcaagatgtcaccttattgctgcattctttggagtggagaaatgctatgtcctcatatggaggaaggtagaagggcaagtggccaaatgctacatgaagcctcttttttttttttttttttttttttttttttgagacagagtctcactctgtgcccaggctggagtgcagtggtgtgaaatcggctcactgcaaactccacctcccagctttatgaaattctctgcctcagcctcccgaatagctggtattacaggtgcgtgccaccacgcctgctaattttttgtatttttagtagagacgaggtttcagcatcttggccaagctggtcttgaactcctgacctcgtgatccacccgccttgtcctcgcaaagtgctgggattacaggtgtgagccaccatgccccgccacatgaagcctcttttataaggaccttaatccatcccgtgggaggaaccctcaagttctaatcacctcttaaaggccccacatcttaatactatcacattggcaatgccaggtttttggaggggacacattcaaaccatagcacctgccttccccaaaccaccccaaatcccttggtatctgtgcttctattccttcacttcaccaaaacttttctcaagtcaccagtgacttcctggttttcggtccagtgggcttttctccatccttttaattctttgctttatccttcaacttacgtgttctcagcacctcccatctggcaggtgctgggctgagggttagaagagagagacggctctggtccctggccacttatccagcctgatgcttcccctcctcttcctcttcacagggaaattggaggctctcaggactgaataggtcccctccactctgcctgcttccaccctcacatggtctccaggaagactctgtttttgaactgacttccacttggctttggaatcctttctccctcatttcaggatgtagagcctacttccctgattagccctttaaaaatatacacaggagctggggcacagtggctctcgcctgtaatcccagcactttggggggccaaggtgggcagatcagctgaggtcaggagttcgagaccagcctgaccaacatggtaaaacaccgtctctactaaaaatacaaaaattagctgggcgtggtggtgcatgcctgtaatcccagctacttgggaggctgaggcaggagaatcacttgaacccaggaggtggaagttgcaatgagctgagactgcaccactgcactccagcctgggtgacagactgagaccgtgtctcaagaaaaagaaaaatgccaggcatggtggctcacacctgtaatcccagcactttgggaggccgaggcaggcggatcacgaggtcaggagatcgagaccagcctggccaacatggtgaaaccccgtctttactaaaaatacaaaaattagccaggcatggtggcacacacctgcaatcctagctactcaggaggctgaggaaggagaattgcttgaactcaggaggcagaggttgcagtgagctgagatcacactactgcactccagcctgggtgacagagcaagactccatctcaggaaaaaaaaaaaaaaagtacacagggaacacttgggaaaaacaagaaccacaaataagacaattagaatcaccccaagtcccgcccatctacagctaagttctgtcagccatttgtcacatttggtgtatactcaggctgttttctacgtgctggtatgagtgtatctccatgtacacgagggtacacatttttattctagggcaagtctgtcttctgcattttcgagctcttcctccctgccagctccttcctcatagcctggaaaagagagactcttttccccactttttaatgcaagaatctggggctcattgaagttaggagtgagggtggtccaaagacctgtggaccagtaagaattgcacattcattaaatgagtgtttatcaagggcctgtgtgtgccaggtactgggcgacagacatgaggccaagagacatatggtcctgttctcctgaggctgcagtctacgcggagctgaaggtgagtaggtatcagttggtgctgcttggtgtaccagcactgtccaggagaatcatctctgataatggagatgttctatgttgcacggtccatcacaggctcgaacacgtggggctgctgagcatgacatgtggtcagtgcgactgaagatctgaatgtctcatatggtttaattgtaattcattcaaatttaagtagccgcatgtggctagcggctattgtatcagacagcgcagagctacctgcggaaatgctctgacacagttggggagggggagagaggcaggaagatgttactgaggaagggatgttggagttgagagctggagagggatttaccatgaagccagcaaagccgtggccgttttgtgtcatgctgttgtgttctttttcttaaagaaagtccccaagctctaggccccacaaaacctggctctgcccctggactaagttagacagggccagagcacgtgcaaaggcacgaagaagggagcgtggcagagcgaagggactgaacagagcagtgactgggggagggggcgacgagaaccttgtggaatcccagtggaccccttcaggccagcctggtggctccaggatcccagccggcaccaaggacagcagcagcagcgtggtgactcctcgttcctgagctgctgtagtgagagggcagactccgcgagcagcggctacctggtcctcttggctctgcaccgctttctccccctgtgagttctgccttctgtcggtttcagcgtctctaccaccacagcttgttgtgatcctccgggatcccctgtgactcctgctttactttctggtctctgtctttgcttgcgttgagctccagcttcctctcctaaatgccttattctcagggtttgacaggagcaagagtctgattgaccacccttgtctttcggggccaggctgtgtcgtggcagccactgaatgagctgtgggggtccggggcttcccacccccatcagctatgcctgagggtggcaacggtcaggacctgcaaaatacccacccaggaatctgccttggggttggggcatggggaccacagattgcatgagggtttgcttctgtctctttgtcactccctcaggctgaagtctatccctttagagtcaagatcctgggaagaacttgcttactctttggtctttttcctttacttcctcacctttctgtcacacatttttttcctctcacttttttttggttgccacctttgtattttatttatttattttgagacagagtcttgctctgtcacccaggctggagtgcagtggcacaatcttggctcactgcaacctcagcctcctgggttcaagtgattctcccaccttagcctcctgagtagctggggctacaggggcgcgccaccacacttggctgatttttgtatttttagtaaagacggggtttcaccatgttggccaggctggtctcaaagtcctgacttcgagtggaagtcagtgggtgatccgcccaccttggcctcccaaagtgctgggattacaggtgtgagccaacgtgcccggccccaactttgtatttaaaaaaattaaaaattggccgggtccagtggcacatgccttgtagtcccagctactcgggaggctgaggcaggagaatcgcttgaacccaggaggcagaggttgcagtgagccaagatcacaccattgcactccagcctgggcgacagagagactctgtctcaaaaaaattaaataaaatannnnnnnnnnnnnnnnnnnnnnnnnnnnnnnnnnnnnnnnnnnnnnnnnnnnnnnnnnnnnnnnnnnnnnnnnnnnnnnnnnnnnnnnnnnnnnnnnnnnagaaaagaaaagaaaagaaaaggaagtcagctgggcgcagtggctcatgcctgtaatcctagcactttgggaggccaaggcaggcggatcacctgaggtcaggagttcaagaccagcctggccaacaatggtgaaaccctgtctgtactaaaaatacaaaaattaaccaggtgtggtagcacacgcctgtaatcccagctactctggagtctgaggcaggagaattgcttgaacccggggggcagcagctgcagtgagctgagattgtgccacttcactccagtctgggtgaaagagcaaaactccatctcaaaaaaagaaaaaaaaaaacaacaagtcaggaggcagcctcaagtaggtgcagatgagagtgttctagatacaaggagagagagagggatcaaaggtgacaagttcctagcgtgggtacctagatggctgctgaggccatcatccaaaacagaaggagatacacattggctaagagaagtgtttgattttattgatttagaggcagggtcttgctctgtcgcccaggctggaatgcagtggtgcaatcactgttcactgcaatcttgactccctgggctcaagcgatcttcccgcctcagcctcccaagtagccagaaccacaaatgcgtgccaccatgcccggtaaattttgtatttttttttttttttttttttgcatagatggggtttcaccatgttgcccaggctggtcttgaactcctgagttcaagcgatccacctgcctcagcctcccaaagtgctagtattgcaggtgtgagccaccgcgcccagccatgtttgattttagatgcggtagggtaaggttcctgagttgaagtttcaaaatcaactttatcaagctataattcatatattgtaaactgcactcatttgaagtatataatttaattaattctgacaaatgtatatacctgtgcagggccaggttcatgggctgtttgaccccccagtggtcacacagagtcctactcctttttttttttttttttttttttgggtttttttttgagaaggagtcttgctcttgttgcccaggctggagtgcatagacgcaatctctgctcactgcaacctccgcctctcgggttcaagcgactcttctgcctcaggctcccgagtagctgggattacaggtgcccaccaccatgcctggctaatttttctatctttagtagagatggggtttcatcatattggtcaggctggtctcaaactcctgacctcaggtgatccgcccgcctcagcctcccaaagtgctggtattacaggcttgagtcaccacacctggccggggaaaaattgtttttaaatgtttctttcctatttagtccaaattgctcattgatggcagttatcaagaacttgaatagatcatcattcaaaaatcttcactggtgattatttatagccatttcaagcatatgaaaaaagaatgtttaaaaaagcccgtgtctgtgctacctttgccatcctcgctgcagagcagtgcctcctatcaggcagcccctggccacatgtggccgcagagcatttgaaatgtggctactccaaattggaaagtgctgggtatgtaaaacgcacaccagatttcgaagacgtagtaagaaagcaagaatgtaaaatagctcattcataattttatattgatgacaggttgaagtcataatagtgtggatatattagtttaaataaaatccattataaaaaaatttttaagttatgttcatagaagcaagctcaggtttctcattaaaattttgaaaatattttatttggaaaatttcatacaaattcagtatgtaatatgttctctaattacattattttcatttttataattctttactctaaagaaaacataatcactttttccatcaagctccacatagacgtccccaggtccctcccccaacccctccagtttacttaagtgtgtcattaaaaaatggacatttcttatgagtgtgatgacatgaaatagtttccagaaaggtatttttgagcatctttatgatttggaaaggcatttttgagcatctattcatcctgggtgacctgctggattgtgggaatacagagttgtatatattgtatattgtgttgtatgtgtatcaataattatgcagacaggtgtggtggctcatgcctgtaatcccagcactttgggaggctgaggtgggcggatcacttgaggtcaggagtttgagacgagcctggccaacatggtgaaaccccatctctacctaaaaatacaaaaattagctgggggtcgtggcatacgcctgtaatctcagctactcaggaggctgaggcaggagaattgcttgaacctgggaggcagaagtgcagtgagttgagatcccgccactgcactccagcctaggtgacaaagcgagactccatctcgaaaatatatatatgcaagggaactcttggttgttccactaaggagctcccagcaacctgctctgtgcgctgcagaatttgtgggtatccctgggaggcctggaccagccacagagcagcagcaggccaggaggtgtcagtcttaacagagtgacttctaggagaggcagggccctttgctttttttgagattgtatttaagtagggcccttttctggctccttattgaatgtttccactctactggattttctctctattgtcccgtaaactcccgaaggccttgctcagctaccaacatctgtttcgggtttcctataatccatatgcctgaggcaaggcgtgtccagaaagcagaggctgtgctacccgggtgcttgtaaactcgattattgtttatatgtatgactttggcaacccatttagtcctcgttacgggcaagcctaaggccaagactgactttctgtttccaacttcacacttctgggctgaatcctgcacactccataaacagcctctgcacatgggaagccacctgcgtgtgcccctccttcacataattcaagagttgctggcattttttcagctcttctggaatcaggaactcagtcttgtggagcccaggagactgtccatttggaaaatcatcagggagctctgaaggggacagatgtcaacatcaggtcccaggctatgggatcactttctggacatgcaaatacacgatatgaaatctgttcaggccaggcgtagtggctcatgcctgtaatcccagcattttgggaggccaaggcaggcaaatcacttgaggccaattcgagaccagcctaggcaacgtggtgaaatcctgtctctactaaaaatacaaaaattagttgggtgtggtggcgtgtgcctgtaatcccagctacttggaaggctgaggtgggagaattgcttgaacccgggaggtagaggttgcagggagcggagatcacaccattgcactctagcctgggtgacagagcaagactctgtctcaaaaagacaaacaaacaaacaaaaaaccaaaaaaaacaaaaaaaaatgtgatctgttcagattaatattgttttttcaaattctgtgtggatttgggcctgctctgtgatgtaattttgtgatgtaattattcatctttgcccaaaaatacctacataattgtgcctgaagcaaccggtatacaagggtaaatggaatacattgctataaaaactatgtttatgtgtgagctgggcacagtggtgaatgtctgtagtcccagctactctggagtctgagactgggggatcctttgagtccaggagttcgaggtcagcctgggcaacatagcaagaccctgtctcaaaaaaatctccaaactgtgtctgtgtgtggatgtacagtggaaggattgtacttagttacgaaaagtattgtattgagatgacagaggtcatgagtgttatttactgttgagttgtttaaatattaaatattcaaaccttaaaaactgttcagttatttaaaatgtatgcttaaaatgtttaaagggataaactgacaaagtcctttgaagaaagcctgttaaaagaatttctgccattaaaatgtccaacaatagcggccaggcgtgatggttcatgcctataatcccagcattttgggaggccgaagcatgtggatcacttgagctcaggagttcaagaccagcctgggcaacctagtgaaaccccatctctaccaaaaatacaaaattagccgggcgtgggggtgcacatctgtgggcccaactactcaggaggctgaggtgggaggatcacttgagctggggaggtggaggttgcagcaagctgagatcatgctactgcattccagcctgggtgacagagtgagactccatctcaaaaaaaataaaataaaataaaagtccaacaataggagaatgacgaagtagattacattattaatgcattatcatttattgtacacttactctgtactaggtacaggctaactactaggctaagtgttttgttttgttttttttttttgagaccgagtctcgctctgtggcccaagctggagtgcagtggcgcgatctcggctcactgcaacctctgcctcctgggttcaagcaattctcctgtcttgccctcccgagtagctgggactacaggcacgtgccaccacacccagctgctattttttatttttagtagagacggggtttcaccatgttagccaggacggtcccgatctcctgaccttgtgatccgcctgcctcggcctcccaaagtgttgggattacaggtgtgagccatggcgcccggcagtgttttgttttttaattttttttttttttttttgagacagggtctcgttctgtcacccaggctggaatgcagtggcataatcacagctcactgcagccaccacctcctggactcaagcaatcctcccacctcagcctcccaagtagctgggactacaggcacgtgtcaccacacccagctaatttttgtatttttttgtagagatggggtttcaccatgttgcccaggctggtcttgaactcctgggctcaagcaatatgcctgccttggccttccaaactgctcagattacaggcatgagccaccgcgcctggccagtctacgtatcttatatgcattatttcatttttttaatgttcaaaataaccccaaagaatataactattgtcattatcattttcattttattgatatgaaaactagggcatagagacattaagtaactcagtaaagacctcatagctagctagtggcagagatgggatttgaacccaagattatttgggtcctacacccaagtgttaaccactaggttaccaagccacacactaccacacagccacgggaggttttcatagccatgaacactatcggtggagctatgatggttagaactttaaaaggaaggcgatttgcacacaattaaaaatgcacatacaaggctaggcacggtggctcagcacttttggagtctgaggtggaaggatcacttgagcccaggagtttatgaccaccctggacaacatagtgagacatcatctctatctttataaaaaataaacaaaattagtcaagtgtggtggtgcacacctgtagtctcagctacttgggagtctgaggtgggaggatcacttgagcctaggaagttgaggctgcagtaagctgagattaagccactgcactccagcctgggcaacagagtgagaccctgtctcaaaaaataaataaaatgcacataccaattatcacacaagttcacttctaggacactgtgatggttaatttcatgtgttaatttgactgggctaagggatgtccagctagctggttaaacgtgacttctgagtgtgtctttgagggcgtttccacaagagatgagcatttgattcaatggcctaactaaagaagatccaccgtcaccaatgtggatgggcatcatccaatccacccgagggcccagaggaaacaaaaaggtggagggagagtgaattcattctggttcctggtgctgggacatccatcttctcttgcccttggacatcagaacacctggttcttgggccatcagactctgggacttacaccaatggggcctcttccacttcttgctcagggctttggccgtggactgggagtttcaccattagttcccctggttttcaggctcccacactgagactgagctatgccacctgctttcctgggtctccagctgcagacagcagatggtgggactccttggcctccataatcaagtgagccaattcccatcacacatctcctcttttatctatatctgtagctcctatcggttctccttctgtggagaaccctaactaatacaggcactatccaagagaaatgactctatagatgcaatatttggcagctctttctcttttttttttttttctcactctgtcacacaagctggagcccagtggcccgatcttggttcactgcagctgaagcgatccacccacctcaacatcccgagtagctgggattacaggtgtgcgccaccacaccaagctaatttttttttcttttttttttttttatagagacagggtctcatcctgttgcccaggctggtctcaaactcctgacctcaagtgatccgcctgccttagcctcccaaagtgctaggattacaggtgtgagccccgcacccggccttggcaggtttcttaaagtgcagtggatccctatgtactgataagaaaattgctccaagatatacggaaaagctagttgtagaactttttttttatttttttttgagacggagccttactctgtcgccaaggctagagtgcagtggtgtgatctcgacatctctgctcactgcaacctccgcctccctggttcaagtgattctcctgcctcagtctcccgagtagctgggattacaggcgccggccatcacgcccagctaatttttgtatttttagtagagacggggtttcgccagtttggccagcctgttctcaaattcctgacttcaggtgatccacccacctcggcctcccaaagtgctgggattacaggtgtgagtcaccgtgcctggccagaaccatttttaaaagctgttttgtatgagtatagagaaaggtctgcggccaggcacagtggcttatgcctgtaatcccaacactttgggaggcctaggcggggggatcagttgaggtcaggagtttgagaccggcctggccgccatgacgaaaccctgtctctactaaaaatataaaaattagcctgacattgtggtgcacacctgtaataccagctactcaggaggttgaggcaggagaattgcttgaacccgggaggcggaggttgtagtgagctgagatccggccactgcactgtagcctgagcgagggagcgatatttcatctcaaaaaaaaaaaaaaaaaaaaaaagatctgcaaggataaaaactaaactgttcaaagaactgttaaaagtggttctccctgaggcatgaggggaaaaagaattaaagtgaaaaattttccttttttctttacatatttctgaatttttttagtagtaagtatgtattacttttataataaaaaaggaatatggaaaacaatgttttcaaccaattttaatgatatgggcaagtactctaacaggtgaaaaaaattagagcatgaaataatgtgtacagtatgagctcagctacagaaaaatgcatttaaaatccaggtaggaaatatatcaaaatgttaatagggattgcctctgggtggcaggattataggtgggttttttttctgcttttacttttctatactttctaaatgtgccttattatttgtataattaggaaaaaattaagttgatctgccaaaggttcatggcaggttgtaaaacacaggcagctgaggccagtttcaactgcaggtcattgctccccacaccgggggacgtgacggcccaatattgttaaccagcaaaggaaaatttcctaattgcaattttcctaattgcaggtgaggagaaaacatggtttgtctccattttgcttttctgattagattgcaagagaagacaggggagagagatgccaagggaacaaagttctcctggtaaagaggagcagaatcaggagtctctgggctaagggacgtccagatgtactctcctatctatttttttttttttttttttgagatggagtctggctctgttgcccaggctggagtgcagtggcgcaatctcagctcactgcaacctccacctcctgggttcaagcaattctcctacctcagcctcctgagtagctgggattataggcacccaccaccacgcctggctaatttttgtatttttagtagagtcagggtttcaccatctcggctggctggtcttgaactcctggcctcatgatccacccatcttggtctcccaaagtgttgggattacaggcatgagccaccacgcctggcctctcctaggtattttgaaatatatgatacactattattggcaatagtcagtctactgtgcaacagatctcaaaaattattcctcttgtcaaattgaaacatataagtgaaatcatgcagtagtggtctttctgtgcctggtttatttcactttgcgtgctgtcctccaggattcatccatattgtcacaaatgacaggatttccttctttttttagggctgaatgatgttccattgcatatacactctagcatcctttaatagcttagaggcagttgtcctctgcagcaccaccactaagaaagaggcataacactaagtggaactctatggttcttagcggcaacataatttcacatttacgtacactgttttgacacatttgttgagcagggaaaccagctatccggtggtggggtgactaactcctttattatggtatctagaattgtcatgcttgagaatttacttatttaaatacattttatctttattttaaacaaattattcgtttcccctttattatgcagttaggaatagagatagagagatggataaatagatcttaaaatttatgtatgtagttaggatgttttacctctgaatttcattcagagtagtaaaggggatattacaaaatatttgttttacaaagaggctttggggtgggaatagaaatcctggaccagaagtggatgtggcactaatgagactccaggttacttccctttgcaggtaatgcatacactttctgtttgtttgttttgttgttgttgttggtttttttttgagctggagtctcgctctgtcacccaggctggagtgcaatggtgcgatctcggctcactgcaacctttgcctcccaggttcaagtgattcccctgcctcagcctcccaagtagctggaattacaggcatgcgccaccatgcctggctaatttttgtgtttttagtagagatggggtttcacatgttggccaggctggtctcgaactcctgacctcaggtgattagcttacctcagcctcccaaagtgctgggattacaggtgtgagccaccatgcccagcccacttctgattatacaaaggattatatctttgtatcagcgacaacattttcatttttgaagtatgaaaatggggagaatttttttcattgccaagcagccggagatgtgggctctggtgagcatctgtcattcttctcattactcagctcctgaacaccccatatctggctcctgggcattccttgcctcatgagtctcaggacaggcagagactgccttcccagaagctagaaggtccagacgctgccttcccagcctcccgggagctgggtgtggactcctgtcctgggcacacgcagagaagatgctcctgccctggactttgagtgaggatctgattgacttccactggtaaggggggatctccttactgagcaggtgatatttcagctgagctttgaaggagaagtagatactccaagttgggaggttggagtgagcagtaggtgggttaggaggttgggtcggtgggcaggtattccaggtgtggcaaaggaataagtataaatatattttaaagtaggcaaaatgctattaattttactcatggatattggggtctaaggaccctgaaaaaggatcagatttaggttctttgtatgaccttgggcaagtttctcaacctctgggcttagtttccttacctgtaaaaaggaactactcccagtgatgtgccaacctcacaaagtttttgtgggatcaaatgaaaatgaaagtaaaaatactttttttttttttttttgagatggagtctcactctgtcacccaggctggagtgcaacggcgcgatcttggctcaccgcaagcttcgcctaatgggttcacgccattctcctgcctcagcctcctgagtagctgggactacaggcacccatcaccacacctggctaattttttctatttttagtagagacggggtttcactgtgttagccaggatggtctcgatctcctgacctcaagatccaccagcctcagcctcccaaagtgctgggattacaggcgtgagccactgtgcctggccaaaagtaaaaatacttttaaatgaaaaagcctattagccgggcatggtgtgtgcctgtaatcccaggtactcaggaggctgagataggaggatggcttgaacccagcaggttgagactgcagtgagccaagactgtgccactgcactccaacctgggtgacagagtgagacccccatctcaaaaaaaaaaaaaaaaaaaagaaagaaaaaagaaaaaagaaacagcctgaacaaaaatcaataactatgaataattggcatggggttgtgagagcaaaaacaaaatagagggcgcaaagtccaggctgagagaggttggaagagaattaagagtttgggaaggaatttgtcagataaaaaaactacttttctggaaagcagaaagtatgggccccagagggtcagggtaggttgggggaggtggtcaggaagcttttcacacctagccagccggcaggtgtcagaaggagcagagagatgcagctagagaagggaggtgcctgggctgggcacggtagctcatgcctgtaatcccagcactttgggaagctgaggcgggcggatggtctgagctcaggagtttgagatgagcctggacgacatggcaaaaccccgtccctactaaaaatacaaaaaaaatcagctgggcgtggtggtgcgtgcctggtagtcccagccactcgggaggctgaggcaggagaattgcttgaacccaggaggtgaaggttgcaatgagccgagattgcaccaccgcactccagcctgggtgacagagcaagactgtctcgaaattttaaaaaattaaaaattaagagggaagagcctcatgcttcctctctcctgaggcaggattcatcctacatgtccccacagttcttgtgcagtcaccccaactgctttgtgggtggtcctaacctttcagtcagtcttggtacaaatgccttttgttattagtaaactctatctagccaatgtcttctctcacatttgagtctaaattttcatctcagaaagtaattctaacttcatctgggggagctctgccaactctcccatgcagaatgtgacatatggccgtaaatgacctgtcagccttgtgcagacaaggagcttaatgcagctcctgcaaatattgtcacttaggtgctcctcaggaccctcaaggtcaacaggtccaaagagaagtcatcacttttgttcattaacactccgcctttgtctctctgtcttgggcgccatcttcctacttacctgggctcaaaatcagaactcatatttgacaccaccttcctgtttgtgtcccaacccaaacttgtgactgcgagtaatttgaaagtctttgccctcaggcatttggggtactgcagaggcctggcaggaacgtgtgcttcaggcatccaggttgctgacagggaaatgaatcgtttagcaagggagcgtcgaccgcccgcagcaccttcagcccaatgggtgatgctcttaaagccggggattcctgaaggtctgcaaaagtgctcctcatggatgacaaggacccattccattgcttctacaatgtctctggggctcctgtgctgtttgctccccaggcccgttggcgtgctcatcttcacttgggctctggcagtgatttccccatttcttcctgtccccataaatatggcctccatcatgaaggtcctctctcacacacacacctggccacgcccttctcagacctttgggagggactgcatcccacagaatcagggttgagcccttcacctgaccctccaagccatcacagccaggccacagccctttctccagtattcccttccatccagcttttcttcttcattgctgccgctcctgctgcaaccaaattcacctgtgcggctactctgcgatgaaagaaccagcccatgtcacatgctctgtcaatttgatcagtgttgtcattgtcctgggtcatcatactgttactctcactaccattccaaactataaatagtctgctaagaagagcaagaccaggccaggcatggtagctcatgcctgtaatcccaacactttgggaggctgaggcaggtagatcacttgacgtcagaagttcaagaccagcctggccaacatggtgaaaccccgtctctactaaaaatacagaaattagctgggcgtggtggcagacgcctgtaatcccagctactccagaggctgaggcacgagaattgcttgaacttgagaggcagaggttgcagccaagattgtgccattgcactccagcctgggtgacaagagcgaaactccatctcaaaaagaaaagaatagcaagcccgtaaatgctgaaaacagagctgatgattcaagttgcataaattaattgtataagtgagagaaaggtcagggacctggtgacagcatgtggccctgggctgaaagacggcctgctcatcccaggagggcccggggagctgggaagatgtgggtaacggcacgcccctgccatgctcctgggccttgtccccagccaagccaccccactgaggctgccagatccacaatgtgaggagacacaacttcacatggagttttcacaccttgtggctggaaaaagttctggatgcaaatacattctccccagagctctggtggatttgagcaggcactgatgtgagaggacgggaaatggaggaaactaaataggtcacagccttgatctcgtcccaggcctggcctctccgtgaacccaggcttagcctttgggctttaggggaaagggtagaagaggcaggagcttggccgggtgcggtggctcatgcctgtaatcccagcactttgagaggccaaggcgggtggatcacaaggtcaggagatcgagagcatcctggataacacggtgaaaccccatctctactaaaaatacaaaaaattagccgggcatggtggtgggtgcctgtagtcccagctactcgggaggctgaggcaggagaatggcgtgaacccaggaggcggagcttgcagtgagccaagatcatgccactgcactccagcctgggcgacagagccagactccgtctcaaaaaaaaaaaaaaaaaaaaaagaagaggcaggagctagagaaagggggagaaaaggccactcaccctaatgtaagaggcagacaggtgacgcacaggacgccccctgtaaatgggagaggggacagcttcaatgagagtggcccactttggccctcctcatccctctctcctatggcttaaaatgaagctggggctttgtttttcaaagagagcaacagcgcaggggataactgcctttgaaaaagtagtttgttactcacagttcccatgaggaaggggcacaccacaccacacaggctcacacagggcagcaccagggttggtcaggaggcagaggcggtaagaggggaacatgggctggagcatttatgggctgaagggtttatggggtggaaacacgggccggagttttgtgggaaatcatgcacaaggtggggtatgcaagctgagcaggctctggatgagatagtttgaataattttggtgggctccaggggtggtccctagttgtctgctacctggtcttggggtgattcagaccaggggataatgtgctggactgcaggagccagtcctgatcaaaggacacagatcaagagtgtagactcagaaggagctggtctgggccgggctcagtggctcacacctggaatcccaacattttgggaggccaaggcaggaggattgcttgagcccaggagtttgagaccagcctgggtaacatagcaagaccttatctctactaaaaattttaaaaattagccaagcatggtggtgtacacctgcagtcccagctactcaggaggctgaggtgggaaggtggcttgagcccaagcagccaagcctgtagtgagccatgatcgtggcactgccactcgagcctgcgtgacagggtgaagaggtggctggtttgcatatgaaagtcaggcttctaggtgagttgtctgctatttctaggcattaactagccctggcataagagcagtctctctccaggttcacaaggcccccaagatgtcaagcatcacaaaatacagaagataaaaaacatgagtaatatctgccagaatatggcaaagcatcagtgaatctctgcaggatctgcaacttctctgtaagccccacccaatgatgtagggcccaagagccaaaatggcaaagtcacagcaagatgctccaggttccctcaactctaatgtcagctggtggaaacttacactgtcaccctctcccaggcttcaatttcacttatcagtgaccttggactcctctgtgaccttggacaggttacttcttccctagggttattgggagaattaaagaaatctgtgtacagaagcttctctacccaggcttcttgctctgagctgcataactcctgcctgagatccctctggagctgactaggaaggtcctgactctaccagagaccttcatatgacctgtgcctgggccacattcaattaactgtggttacatcgtgaggccaagagaagtgactttttttttttttttttttttgggacagagtcttgctctgttgcccaggctggagtgcagtggtgcaatctcagctcacttcaacctccacctctctggttcaaggattcttgagcttcagcctcctgagtagctggggctacaggtgcacgccaccaggcccagctaatttttctttttttgcttttttgagacagggtcttgctctgtcacccaggttggagtgcaatggcaccatctcggctcactgcaacctctgcctcctaagtttaagcgattctcatgccttagcctcccaagtagctgggtctacaggtatgcaccaccatgccaggctaatttttgtattttgaatagagacgggattttgccatgctagccaggctggtctcgaactcctggcctcaagtgatctgcccaccttggcctgccaaagtgctgggattacaggcgagagccaccatgtctggcccttaatttttatttttttatttttagtcgagatggggtttcgccatgttagccagactggtcttgaactcctggcctcaactgatccacccgcctcagcctcccaaagtactgggatttcaggggtgaaccactgtgcccggccagaagtgactgccttaaggagacatttcagagaagaacaggcagatacgggggcaatgtcaaatcaccccaaacaggtgaaaatgaacaccattaactgggagggctggctgggctaggcagtcatcacgaaggactggaagggggctctgagggcctaggacacagagctcaccccggagtgtgaggtttttccggtgccacatgcagaaggctggcatccctcagctggtccacagatctgctgtagccctaatactgaaattaggcatatacagtaaacataacaacaaagacaacatttttagctctgttaggcccaggatgagaaataaattcacaacctcaaaggaaaatggaaatgtcacatccttttcaagttcctggtagtacctgtacattccaaactggagaacagactattcatttactttgaaaatggacttttttttttttttttttttttttttcctgagatggagtcttgctctgtcgcccaggctggagtgcagtggcttgaccttggctcactgcaacctccacctcccaggttcaagcgattctcctgcctcagcctcccgagtagctggaattacaggcgcccgctaccacgcctgactaatttttatattttagagacggggtttcgccatattggccaggatggtcttgatctcctgacctcatgatccgactgtcttggcgtcccaaagtgctgggattacaggtatgagccactgtgcccggcagagaatgggccttttaaattttttttatatttttatttacatttttgagacaaagtctcactctgttgcccaaactggggtgcagtggtgtgatctctgctcactgcaacctccacctcccgggttcaagcgattctcctgcctcagcctcctgagtagctgggactacaggcgtgtgccaccatgcccggctaatttttttatttttagtagagacggggtttcactatgttggccaggctggtcttgaactcctgacctcaggtgatccactgcctcggcctcccaaagtgctggaattacaggcgtgagccaccgcacctggcctgaatggacctttttaaatgtaagattgtttctcctagtcttcttgtatttacaaattccatgaagactaaaatttagagttcatctccgcaaatactcctcaatcccacctcctctcaacacaaagatctctctatataattcctgataagagagcaacctttcgctgaagagatttcacagaattctgtagccaacactctttgtcatcccatgtcccagccagcactgtgactgtggaaccacccagaccttagaccccagggtacccccgtacccctgttttctaaaatgcctgactcatcctgcccaggctttcatgaagaaagcgaagtgaaagcctcccacacgcctttaaaaatgtctcctctaaattccagttgtcgtagtaacatcttcacgctgccttggtgcctttatatattttggtgctgatggaccctccgttaccatgagaacagaagtagatttaaacaaagagaattttgtggcacttatcttaatgtcttatggaaaacaaaacccatgcccacggcgaccgcctcagaagagttcagagggtttaacaatggaatggcaagaagtcctgagttcctgggacctagaacgccactggagttccatttcatttgttcttcgaattttattttgaggaaaatgtgcatcgttgttgtttttaagattctgttgcaccattgccattctgaagtgagcagatctgttgtaaacgcatattcttaccttcagctttgaggacaaacttatcactcctaccacaaaattgtaaccatttcctgagctgtgcttcactctacccccacaccccagccccacagccccttgtgacagggcagtgccagctgaactgatgttccctgctatttcagactcaaggtctgtgcatctattctttctttcaaagctaaatgtttgaaaaatggaaggtctttgagctcaaggacattaacacacacttcttcagcactctctgcatagtcctaattgtcagtttgttcgactttttttttttttttttttttttttgagacgttgttttgctcttgttgcccaggctggagtccaatggcacaatctcggctcactgcaacattcacctcccgggttcaagcaattctcctgcttcagcctcccaagtagctggaatttcaggcatctgcccccacaaccggctaatttttgtatttttagtagagatggggtttcaccatgttgaccaggctggtctcaaactcctgacctcgggtgatccacctgcctcagcctcccaaagtgctgggattacaggtgtgagccaccatgcctggctttgactttaaactttccattctgatgtacagaattaagtttctgttgagaattttaaatagttaacttcacaggatttgtatgtgggaacaaacttgaaggtaggaagaaagcaaacccacagtctgaatagcaggctgtgtcagtgacacattccttaattagtccttgagaacactaacatgtattgtgtatttaccacatgctaggcactatgctaaccacatagcctgttgtcttcatctgttttctgtagctataacaaaatccatatactggataatttataaagataagaaactatttcttacagttttggaggctgggagtctgagtgcatggcgccggcatgtttcaagggccttcttgctgctttgtaacactgtgaagggcatcgcatggtgaaagggcaagagactgtgtcaagttaggtctctcttccttgtttttttttttttttttttttttttgagacggaacttgctctgttgcccagactggagtgcaatggtgcaatctcggctcactgcaaccctccgcctcccagattcaagcaattcttctgcctcagcctcctgagtagctgggactacaggcccgcgccatcatgcctaatttttgtatttttttttttttttagtagagacagggtttcaccatattggccaggctggtctcgaactcctgacactgtgatccgcccgccttggccccccgaagtgctgggattacaagtgtgagccaccgcgcctggccagaggagggagatttcattccgaggcctcctctcttggcttgtaggtggccgccattttgctgtgttcacgtgaccccttctttgtgtgtacacgtggagagagagggcaagctctctggtgcctgttcttaaagggactgtgaggcctctgagcccaagctaagccatcatatcccctgtgacctgcacgtatacatccagatggcctgaagtaactgaagaatcatagaagaagtgaaaatggcctgttcttggccaggcgtggtggctcatgcctgtactcctagcactttgggaggccgaggcgggcagatcacaaggtcaggagatcgagaccatcctggttaacacagtgaagtgaaaccctgtctctactaaaaatacaaaaaaactagccgggcgtggtggcgggcgtctgcagttccagctactcagaaggctgaggcaggagaatggtgtgaacccgggatgcggagcttgtagtgagccgaggttgcgccactgcactccagcctgggcgacagagcgagactccgtctgggggtgggcgggggagaaaggcctgttcctgccttaactgatgacattccaccacaaaagaagtgaaaatggccagtccctgccttaactgatgacattaccttgtgaaattccttctcctggctcatcgtggctcaaaagctcccccactgagcccttgtgacccctgcccctgcctgccagagaacaaccccctttgactgtaattttccactacccacccaaatcttacaaaacggcccccacccctatctcccttcactgactctcctttttcggactcagcccgcctgcacccaggtgaaataaacagccttgttgctcacacaaagcctgtttggtggtctctttacgcaagtgaaagggacactaatcccatcatggggattccacacttgcgttagggttctccagggagacagaaccaataagatacatgtatatacgaaagggagtttattagggagaactggctcacacgattacatggccaagtcccacgataggctgtctgaaagctagggaaagagagaagccggtagtggctcagttcgagtctgaaagcctcaaaaccagggaagccgtcagtgcaccctccagtctgcagctgaaggcctgagagcccctgggaagtcactggtacaagtcccagagtccaaaggccaaagaacctggagtctgctgtccgagggcaggaggtggggaagcaagcatccagcactagaaggaaaaatagagccagaagactcagccagcaaagctatccctcttcttccgcctgctttgttctagctgccctggcagccgactggatggtgcccacccacaatgatggtgcgtcttcctctcccagtcctcaactccaatatcaatctcctctggcgacatcttcacagacacacccaggagggtactttaccagccatctaggcattcctcaatgcagtcacccaatattcaccgtcacaaccctcgtgacctcatctaaccctaattacctcccaaaggccccgcctccaaataccattacatttggagttaggggttcaacaaatgaactgaagagggaaggaacaaaaacattcagctcttaacaggcggttcttgcccccatcttctgtacatggtggcagctggagacattctgggtggactggctgcaggagccatggtggccgcccaaggtggagctggagaaggcactcgaccttccttgtccgtccgtggagcctacagagggctgaggtcaacttaccggcactggggagacagagactgcagtagagcccatgaatggagggctctgggtaatatgcaaagatctggggtacaggggcagatgcctctgactgggcaccgtggtgagccagacttgtcattcaagggaaggacctgtcagcaggctgctgcattttgaccagaggcctatattacgagcacgtcagctgacccatccatcaaagcaaagctgggccaagggattctctccaccacagcaacctaggggcccatccctcccacaccctgcgccgccctttcatcgcctctcaagatcaacattagccacaccttcaaactcttctgtcctccatctgagctcacttggtggtggtgtgcacacacacaacacacacacacacagtgtacacaagcactcagagtgtgcacgcacgcacacagacacacgcacacatgcatatggacatacacagagtgtacgcatgcacacagtgtgcacgcatgcacacgggcacacgcacatgcatgcacacagacacacacacacaagcacacggatgcacgcacatggacacacacacagagtgtgcacacacgcacacacagcctggctgtacggcggcctcaagccgcggcgttgccatatgggctcttggaggctgaatttagcagggcggatggagctcaaccacgtccccgaacagaagccctcaggctgcacacacccggcaccacactgtcaaagaggtcaagggtgaaggacacagagagaagcggtcaagtggtgctgacgattcaactccaaggtcaaggcgtgggccctattgggtggacactgctgtttatagctccccttgtgaagcgtttttggcaaatacgatgacagtccgcatgacagtgactggggacacgtgagtgagcccctgagctcgcagccgcagtttgcatggcctccccgagtctgcactctgaggctctgcctccagcctgacgtctcatcacagcttctctacctcctagtctatatcctaccttctatatcctagtcagggagagaacacacaaaattgaaataactgcagacggctgttcaccgcatgacagatccaaggtgcgaataaggaaatgtagattccagctgggtgtgtcaggagcggtgaagggcgagcaggcaggtgtggactgttttctgtgggaggtgggttcgaggcctcagagggtaaaggagtggggtgggccaggtgactagtagcccaggtgtggccttgagactggggggcaaggtgtgcaggggcagagggaggattggcttctctgcgccgcgaggggagagaaggcttcgagcaaaggactggggtggtggccggtccttctgagaaagcctctcccttctatctgccacccaccccaccctgcccccacgcagagagaaagcctcggggcatgggggcctctgccctgcatctgctgtccctctgccgccacctctctcagagacctggaacaaaaagggagaagccttgattttattttgtattttgtattgttgtaaaatatacataaaatttaccattttaaccatgcttaagtgtataaattagcagcattaagacccttcacaatgttgtgtaacaatcactgacatgcatttagaaccttttcatcatcccaaacaaatgctctaaacaataacttcccagccaggtgtggtgacacaccctgcagtcccagtcccagctacttgggaggctgaggcctgaggattacttgagccttgggaggtggaggtttcagtgaggcacgattgtgccactgcattccagcctgggtgacagagcgagactctgtctcaaaaaaaaacaaaaacaaaaacaaacaataatgagtttccattccagcccctcctcagcaacacccccctcccacacaccaccaccaccaccaccaccaccaccaccaccaccaccaccagcactattctacattgtgtcaatgaactcacctattctaaattactcatctaggtgagtcatagaatatttgtccttttgggtctggcttatttcactcagcagaatgttttcaaggttcatcactgttgtagcatgtgtcaggatttccttcctctttagggctgaatattgagtgaacgcatcacatctgtttatccatttgtctgctcatggacgcttggtttgattccaccttttggtcattgtgaata

SEQ ID NO: 1796 - protein, 361 aa, Homo sapiens
MLPRLVSNAWAQGIRPPWPLKLLGLQPAKGKKGKGQGKSHGKKQKKPEVDILSPAAMLNLYYIAHNVADCLHLRGFHWPGAPKGKKGRSKTLGQVQIAGPYPRRKDGAQGFAFLVRWQVMLVLPSHTVRQGQSTCKGTKKGAWQSEGTEQSSDWGRGRREPCGIPVDPFRPAWWLQDPSRHQGQQQQRGDSSFLSCCSERADSASSGYLVLLALHRFLPLSPQAAHTRHHTVKEVKGEGHREKRSSGADDSTPRSRRGPYWVDTAVYSSPCEAFLANTMTVRMTVTGDTSKVRIRKCRFQLGVSGAVKGEQAGVDCFLWEPLLSNTPLPHTTTTTTTTTTTTTTSTILHCVNELTYSKLLI

SEQ ID NO: 1797 - DNA, 889 bp, Homo sapiens
  source (1)..(889)
  CDS (201)..(689)
gtctatgatcctaacctgtacaatattggatatatttgtaccagacctgtttattttcttcctgagtaaccaaagcatatattttatacagaatgaggtattttctaactttgatttgttattaattagtatttcttaagtgatttccagagcactgtgctaatagttttgagaccacagacacttacatattatataggatgatacagtgtgttgctaaactcatggattttatactacagtataaggtacatcaatgtaaaacaaggatatccaatttatttatttatttacttatttatttatttttgagacagggtctcactctgtcgcccaggctggagtgcagcggcacaagctcagctgactgcaacctctgtctcctgagttcaagtgattcttctgcctcagcctcccaagtagctgggattacaggcatgcaccgccacacctgtctaatttttgtatttttagtagaggcagggtttcacctgtctctgcaggtggctagctggtttcaaactcctgacctcaagtggtctgctctcctcacatcccatagtgctgggattgcaggcatgagctactgtgcctggccaagaatatccaatttaaatcagaaaagaaacaaacaaatggttagatacgttctgggaagtcacgtgggtgctttgaatgacccattgtgaggaaggtcacgtcagattgaagttacatgagtatggggcacaaacatcatcacagcagaaatgctgatgccaatatttgtcaagcggaatgtaccctccctcttaactggtaatatgttcaggccttattctaagcactttataatattttaactcaatcttggctttatgtctattttacagatgagatagctgaagca

SEQ ID NO: 1798 - protein, 162 aa, Homo sapiens [sequence omitted]

SEQ ID NO: 1799 - DNA, 1237 bp, Homo sapiens
  source (1)..(1237)
  CDS (201)..(1037)
ctattaaacctctttcctttaaaaattacccagtctcaggtattttttcatagcagtgtgagaacagactaatatagtaaattgataccacagagagtggagtgctgctataaagatatgtgaaaatgtggaagcaactttagaactgggtaacaagcacagattggaacagtttggaggactcagaagaagacaggaaaatgtgggaaagtttggaacttcctagagacttggagggctcagatgacaggaagatgtgggaagatttggagcttcctagagacttgttgaatggctttgaccaaaatgctgacagcaatatggacaatgaagtccaggctgaggtgatcacagatggagatgaggaactttttggcaactgcagtaaaggtcacccttgctatgcaaagagaatggtggcattttgcttctgccctagagatctgtggaactttgaacttgaaagagatgatctagagtatttggtggaagaaatttctaagtggcaaagtgttcaagagaaagcagagcataaaagtttgaaaaatatccaacctgaccatgcaatagaaaatagaaactcattttctggggagaaattccagcctgccacagaaatttgcataagtaatgaggaatggaatgttaatcaccaagacaatggggaaaaggtcagagaccttcatggcagcccttcccatcacaggccaggaggcctaggcgggaaaaatggtttcaggggcccagcccaaggccactctgctctgtgcagcctcaggacatggtgccctgtgtcccagctgcttcagctccagccctggctaaaaagggtcagcatacagctcaggccattgcttcagagagtgcaaactccaagccttggcagcttacacatggtgttgggcctgtgtgtgcacagaagtcaagaattgaggtttgggaacttccacctagatttcagaggatctagggaaatgcctggatgtccagacagaagtttcctgcaggggcagagccctcatggagagcctctgtgagggcagtgcagaagggaaacgtgaggttggtgaccccacacagagtccccatgcgggcactgcctagaggagctatgagaaaaaggccactgttctccagaccccagaatggtagatcaaccaacagcttgcaccatgcacctggaaaagccacagacacttaatgccagcagtgaaagcagccaggatgggttgtatcc

SEQ ID NO: 1800 - protein, 278 aa, Homo sapiens [sequence omitted]

SEQ ID NO: 1801 - DNA, 886 bp, Homo sapiens
  source (1)..(886)
  CDS (201)..(686)
gatgtagggtcatagctgtgagcacatctgtgctctcatgaaacttccattttagtggttggaataagtaaaaacaccagggtactttcattttcttttccaaattatgaatcctaaaatgaccaacttcacagcagttgcagaagttaaggtgcactttgtacaaagaaagtttccagcatattctgctgcttagtgctatgctaacaaaacaaaacaggctcaccaggtgtgaattcattctgatcactgtccccttcagagaggtgcttacttcaaaaagccaagtattacctttcaaagtcctgaggtgggaggagttcacacacggtttccctttggttcccttacttcttcccattactttccctcagacatatactactttatataatatagttatatatgtatatatgtgtatacatatatgtgtgtatatgtgtatacatatatatgtatacatatatgtatgcatatgtgtatacataggtgtgcatatatgtgtatacatgggtgtgcatatatgtatacataggtgtgcatatatgtgcatacatatgtgtgcatatatgtgtgtgcatatgtgtgtgcatatatgtgtgcgtatatgtgtgtgcatatatgtgtgcatatatgtatatgatgtacatatgtatgtgtgtatttttattatttatttattttagagttggggccttgctctgttgtccaggctggagtgtagtagcaccatcatagctcactgcagccttggactcctgagctcaagcaatcctcccacccttagcctcctgagtagctgggactacaggcgtgcaccaccacgcccagctatgtgtgtatattaaagtctgtttcttttcactgcattcatagtggttctagg

SEQ ID NO: 1802 - protein, 161 aa, Homo sapiens
MLTKQNRLTRCEFILITVPFREVLTSKSQVLPFKVLRWEEFTHGFPLVPLLLPITFPQTYTTLYNIVIYVYMCIHICVYMCIHIYVYIYVCICVYIGVHICVYMGVHICIHRCAYMCIHMCAYMCVHMCVHICVRICVCIYVCIYVYDVHMYVCIFIIYLF

SEQ ID NO: 1803 - DNA, 7862 bp, Homo sapiens
  source (1)..(7862)
  CDS (201)..(433)
  CDS (3414)..(3766)
  CDS (3873)..(4084)
  CDS (6727)..(7008)
  CDS (7360)..(7662)
gctcaaatcagtctccccgagcgtttggggatcagagattttaaggataatatggcatggtctcagaaagtggggagtgctgattggtcaggttggagatggaatcacagggggatcaaagtgaggttttcttgctaccttctgttcctgggtgggatggcagaactggttgagccacattactggtttgggtggtgttgatggcagcggcccatctggagaggctgctgccaagatgccggctgcagcaggggaggcgccgcagggccgcgcgctttgtggagccggcgggagctgagaacaggaaggaaagagccctgccggcttctgagctggtggggaggggaccctgcagtcccaggcgcaagggcagctgcccagccatggcttcagacccgggcatccgtgtcctctccggcgggggttgggggcggtggcggggggttgggggagggcacgggaagcctatattagaccaaatatcatgttatattttgtgtattcattttttaacccataacaatccaaactagattttcttactgatttattttgcttgtttattaatctcattatgtagaatatattttggaagttgccttaatagtttttagaggaaaacaggataaaaataaataaatatgtaaaagatgccagttttccttatatgtatatgtaatggtgtaaaaaagcactaaataaaataatccgtgtagtggctagggaaataattaaagttaggtttttggtccaggcgaggtggctcacgcctgtaatcccaacactgtgggaggctgtggctggtgatcacttgaggtcacgagttcgagaccagcctggccaacatagtgaaaccctgtctctactaaaagtaccagaattatccaggtgtgatggcgggcgcctgcaatcccagctactctggaggctgaggcaggagaatctcttgaacctgggaggcagaggttgcagtgaggagagatggcaccattgcactccagcctgggtgacagaacgagactgtgtctcaaatacaataaataaataaataaataaataaataaataaataaataatcaggtttttgaaggaatcgagattataaaagtatatttcagaaaagggtgcagcaaatatcttttgaaaattcaagggcagaggtatttctggcagaagtaatgatatgagacatttactacaatattgtttctacttatgcttctgtagtttactaaagacaattattgtttcattggaaatgtaattaatgaacgtgaccctcagtaccatagattgggagccacaaggctggccctgggctgactgtggttggactcactcaggaaccggcttggctggtctcctttaaataactgctgccagctactgccaggagttgcaggatgggaggaagggaagctgactggcccagctgatccataaacagccctttaatagcactgcagttgcttgtgatgagtgcctgggattctaggtttgttttaatagcactgcagttgcttgtgaggcgcgtgcctgggattctagatttgttttaatctttcttttgtgaggggtttccatctcaccctcaactctgttctttgcatcgttcgggctacacatcccaatgtgttcccatctcctcctgccctctagggtgctgaaggttttgcatcctgttctcagcatggacacatatcttctcttttgtccatcacatggtcatttcaataggatgttggtagaataggaagaagatgcacgtgtgtttaactaatcatttttaattagaaagccagaggttgaattgaaaaacaactcatattgaaactgcatttgcaataattataacagtgaggaaattatggcagtggggaagatctaatatagccaacttccctcttatattttaccttcatgttgccttaattattactgggcttaggatgggctagctttgggagacatgtagtttacagtttaaataataatagtccttctccaaaacccaaccacctttataaagctaatgagagaccaccaggctgggaggagaggagcctgaattctgcaaaggtgtagacataaaagactgccagccattattccagaggtcacgagatatgcacacctgtaagtcaccagtcagcaggagctatagtcttgaaaggccagagctataaccagacatgtgctcaggagaaaggggactgcagcagggtgaagagtgggcagcaggaaaaatgtatctccacctcccaggttcaagcgattctcctgcttcagcctcccaagtagctgggattacaggagttcaaggaggtcaggagttcaagaccagcctggccaacatgatgaaaccccacctctactaaaaatacaggcttaagatttaaaataaaataaataaaataaaatagtaaacatccctgccagcctgctgaattgaccttagagagtagggtgtgtagtgggtgtgactctcactgtcaccattgctaagtgcttactgacatctttcagtcttggggacccatcctctgctaaactctgccataagaaggtcatacatccccactgcctgtgatgtctcagttttgttttctcgtttcctcttacctttatgcaatcagtttctaggaagatgttgtttttttcttttttatgattgaaagaatttggttagtttgaccccataccatttcactttcagcacgtgctctctacggttaatgtcatccttgggaagcccgtcttgaacacctggaaggttttacaacagcaacggaccaagcagagttcacagctactacattcagtgggaaggttttcccaagcactacaattaggagatagccctcctttgtccttctcccaaactaatgtgcagatgagcagcatggtaatcatgtccagccacccaaaaacctatcaacagaggtttgttttcccatactttgacctctggggcaatgtggtcattgacaagagctatctagaaaacttgccatcagattcacctattgtcaccatggctttcccaactctccaagccatccttgcccagggtatccaggaaaataattttgcagagagcttagtgatgacgaccactgtcagccataatgtgactatgccattcagcatttcaatgacttttaagaacaacagcccttcaggcggcgaaacaacatgtgtcttctggaacttcaggctttccaacaacacggggggtgggacagcagtgggtgctatgttgaagaaggtgatggggacaatgtcacctgtatctgtgactacctaacatcattctccattctcaagtcccctgactccccagatcctggttctctcctgggaatactactggatattatttcttatgttggggtgggcttttccatcttcagcttggcggcctgtctagttgtggaaactgtggtgtggaaatcagtgaccaagaaccagacttcctatatgcgccacatctgcatagtgaatgttgctgcctcccttctggtcgccaacacctggttcattgtggtcgctgccatccaggacaatcactacatactctgcaagacagcctgtgtggctgccaccttcttcatccacttcttctacctcagcatcttcttctggatgctgacactgggcctcatgttgttctatcgcctggttttcattctgcacgaaacaagcaggtccactcagaaagccattgccttctgtcttggctacggctgccctacctgccatcttggtcatcatgctgggagccacccagccctgggaagtctatatgaggaagaatgtctgttggctcaactgggaggacaccaaggccctgctggcttttgccatcccagcactgatcattgtggtggtgaacataaccatcactattgtggtcatcaccaagatcctgaggccttccattggagacaagccatgcaagcaggagaagagcagcctgtttcagatcagcaagagcactggggtcctcacgccactctggggcctcacttggggttttgatctcaccactgtagtgaccaagagagatggagagaacgatggtgtaagacagtatataaggacagtaagccactgtatttgtggaaccactgcatgtcaaaactccttaacactctaacaaggcatttttggtcttttaagattaaggacagtccttacataagggactcagtttcaaactaaagtacatcaaaaagcaaattatacttcacaaacaactttaaagaggtagccacaaacccagttgttttagattggccttctaaatgaagtcagcacatggatccatgtgtgagtgtcatggacgtcagtgattatgtaactgtcactgaaagaaaaaggcacagctctgcagacacccaagagaagctggcatgtttaatgtggatgtagaagggataatgtccatggcaaatgattggaacacaactgtcagcagcctcaacacaggctaagactgggttaagccccaggagatgcagagaatgactgaggaagctgaggtctaagggcacagtacagaaggtagcttggagtgtgctgtgtttcctagagccttttaagttgggtggttgagtaaaggagggtggaggcaggctgttctacttccaatccatggataaatctcattttctcaatgtaatacagaggctgttcttctatgattggcaaacactatttgttcttatcatggaaacagcatactgctatcaagaaatagggaaaagacagtaaaaaaaatgtgtggaaagaatatggaataccatgcagccataaaaaatgatgagctcatgtcctttgtagggacgtggatgaagctggaaaccatcattctcagcaaactattgcaaggacaaaaaaccaaacgccgcatgttctcactcataggtgggaattgaacaatgagaacacttggacacaggaaggcgaacatcacacaccagggcctgctgtgtggtggggggaggggggagggatagcattaggagatatacctaatggaaaagacgagttagtgggtgcagcaaaccaacatggcacatgtatacatatgcaacaaacctgcacattgtgcacatgtaccctagaactttaagtataataaaaaagtgtggaaagaataatatgggtttctaactgaatgcttgcttttgaagagcccaaaaacaaacgaacaaaaaattctaagagcagcaaacatctacgtctgttatattactgaattactcatttttaaaatccttatttcataggagagatatttacaattttgaattacaacgtttgaaaaactttgaaaataacctgaaaggggaaagttgacctaagccattttattctcttaaaaaaaccccagacttttgtataatagtaatccctgaactgagtatttttgaaggtttttcagataatctgatgtgcaaagttagtttgttttactatttagttgtttggaatagtagagcattatatgaggctcttactggaggcttaatggtattaagagattaaaagctttcacattgttttttacatctataaataaaacaagttgttatcattttgtaatatttagcttatatacatttttgtgagagttttgtgggacttggaaagtgtatggactagcatcagacacaaattatttttccatctttctcacttggaatttcagatagcagcattttaatcatctcttccattaaaccaagattacacaaaagcgtttgaggacactgaggactgggacttctaattttgcttcagaaaccagtactcaaaatgtctggtttggaggtcagttacactgctgtctttgtataatcagccattaaagaatattttggggacatttctcagaagtctcatccccatatttttgttcttaacacatctcaccacaaactctaccacacctatggtttgcaaactttgggaagtgtcagtatatgtcattatcatggttattagtactattatttgttaaaagccctttgaaggcaatttatgcgacttatatatagttagtattttaatttggacattctccagttatatgcaaagattaaaactcggcagcttcattttatagaattggcatcttttatatggctatggggactgcttggtgtctataaattattatgtatatttgttggactgaaatcaaacttaaaatcttccacatttcaagtgtttttattctgagcagtatgtacaaaaaataacgccatagttgtgttaattctgtatagttcaggcaccctccacaggctgtcaatctctgatttgatctacttttaccagatttaacagatccttgaatttactttactgtctatacttcctttttgctcacattgggaatcagactaaacatgcgtctacttcattgaggaactccagattgagacatgctgggattgactccatggttagggaagatggatgaaatggaaacaaaacaggaaacatttgcttggcatctaatagcagttgctgagggccattctgctcttgtagttgtgcctggatcatttgtataaaggccactgttacctgttcttcaaattcattcaggggaggctaaaggtttaaaattttgacaatctgctgggtgctgagagaggcacacagggagcagatggcctctgcatcctcctgggttttcttctttaattgcaggagctgggctgcttggatcagaggttccatggtctgaactactccactctggtgaaggtttcttccccaaagccactcctcaagctgacttatattgtacctgagttgcatgcctgtgctccaagagcagacgtccttccgcaggagcaggtcattaagagtcactgcgttgatcatgtagaagagctgtttgaatacctgcaggatgatctcagggtccaagccctggtcacacatgactgtatgaaaggcattcatctggcggatgatagcttccaggcggtatgagttatccccatctgccatgctggaggagtgcttctgggagccagtgggcttcacaccagatagaccctgaatgctgtcattttccaacatggcagaaactatcatcggctgtaacacaccctcggcaattttaaagagctgctggtagatctgaatggaaaggtcgctcagtacctgacggtattcggtgaggtcaaagttcttaaggcagtgttcgttgtgctttgctgtattctgagtcatgaagccctcatccccgctgtaccgcttcagacagtgaagaaggtggcaggtgttggataacaggaatgacgtcatctcaaagtcatcactgtgcttcttcaggactttcttaatgccgttggtggtggaggtcatcagggagtgcaccttgagatcatcgttggtttggtccgcgagccgaatgcacatgtagaggatgtaggcggagagacagggcactgtgtccaacagcatctggggcttcaagtctgtcaccaggttgaggatgaggagggcctcgccctctttgcggcactccaacatgccctggaaatccttttctttccactgaactgggacctgcctgttgaactcatggcgcttcctctcactctgggccaacgcctgggcagcttcttcatgtaaatcttcagttgcttttagagcttcctctcattcttttcctcttactttatttttcaccacagagcttcctatcaactagtatgttgaatattttgcttattaactttgtttattgtcttctccctcgattagaatattagctacttgagtacaaggatttgagcctgttacattcactgctgaattttaggctcctggaa

SEQ ID NO: 1804 - protein, 460 aa, Homo sapiens
MAAAHLERLLPRCRLQQGRRRRAARFVEPAGAENRKERALPASELVGRGPCSPRRKGSCPAMASDPGIRVLSGGGWGRLAACLVVETVVWKSVTKNQTSYMRHICIVNVAASLLVANTWFIVVAAIQDNHYILCKTACVAATFFIHFFYLSIFFWMLTLGLMLFYRLVFILHETSRSTQKAIAFCLGYGCPTCHLALIIVVVNITITIVVITKILRPSIGDKPCKQEKSSLFQISKSTGVLTPLWGLTWGFDLTTVVTKRDGENDGELGCLDQRFHGLNYSTLVKVSSPKPLLKLTYIVPELHACAPRADVLPQEQVIKSHCVDHVEELFEYLQDDLRVQALVTHDCMKGIHLADDSFQADFLNAVGGGGHQGVHLEIIVGLVREPNAHVEDVGGETGHCVQQHLGLQVCHQVEDEEGLALFAALQHALEILFFPLNWDLPVELMALPLTLGQRLGSFFM

SEQ ID NO: 1805 - DNA, 853 bp, Homo sapiens
  source (1)..(853)
  CDS (201)..(653)
acaccctaaatgaagtcttttatttagtaatgtattccaaatacagagattgacccagattcaggaagtaatttattttggggtttctcaagttttgaacttaatacagcctgatcctcagttcctatctccagacccttatatccaactgcatatgtttctccaaacagatccctcctctgtggcatctcaaattctaaatgaacaaaattgaattcattatttccatctccaaatgtgcaccttcatcttcccaagtcaccagccagaaaccctggaggtattttaggctcttccctcctttcacttcttggtgtccaatcagtcaacacgtattatggcttctatttctttcttttttttttttttttttggagacagagtcttgctgtgtcgcccaggctggaccctgggttcaagcaattctcctgcctcactcagcctcccaagtagctgggactacaggcacacaccgccacacttggctagttttttgtatttttagtagagatgaggtttcaccgtgtgcccagtctggtcttgaactcctgagttcaggcaatcctcttgccttggcctcccaaagtgctaggattacaggcagctttcatttcttaaatgtctcaaacttgcctccctactccatcttctagtagtacatttactagcagaggttaagcatccctaatctgaaaatttgaaatctgaaatactccaaaatcttaaactttttgagcgccaacatggccacaagtggaaaatttacacataaatacttaacacaactttgtttaatgcatatcatttaaaatattgtataaaattatgttcaggctatgtgtataaaacgtat

SEQ ID NO: 1806 - protein, 150 aa, Homo sapiens [sequence omitted]

SEQ ID NO: 1807 - DNA, 30990 bp, Homo sapiens
  source (1)..(30990)
  CDS (201)..(236)
  CDS (12405)..(12582)
  CDS (13808)..(13884)
  CDS (18626)..(18740)
  CDS (23505)..(23710)
  CDS (26406)..(26735)
  CDS (30476)..(30605)
  CDS (30681)..(30790)
agagatggggagggaagggagagaggagcagatatggcaaaatgttagccatcattgactcctggaggagaatacacaagggtgtgttgtactgttcagctttgctgtatgagaaaaagaaaaaaatgagagtgggagagacaaagcactctgatagagggacaggctcaggaggtggtacagtgagggggcaagagagaatgagccccgaagggcagggccgagatgccccattggtgagatgcctcaggggcccaagccacagggctcagggtgggtgaacgtggctagggacgtgtataggcacagtagcccaatgactctgcagcttccagcccaagggtccaagaggacccttgtgcctggaatagagcttgaaggcagcagaggaggagaaggagcccccaggcagggctggttttgctccctccataattaacaattgtctgtgtgactaggtgtttagtcatagaatttcagagccggaaacgacccaagaaatctaagcaaatctctcattttcctgatggggaaaccaaggcatagatttacctggactttcagagtcagataggtgactaaggacaagctaccagtttaaaccattcctacaaacaccctggtgactgtccacagcagaaatgacctgaggagacaccagcttgctctgcccttccttggtgaatctttgaaaccttttctgagtgcatatgtcatcagggagctgcttcttgagtgggttgccacgtggggtttcactcgggccaggcactcgctggtctaggggctttatacatattgggccatttaatcctcaatcctatgagacaggtgctatgtctagccccattttacagatggtaatgataaggttacatggtggccacaaggtcacctcatttgtaagtggcagaattgagattagagctcaggcagcctggctccaaagctggcacctttaaccaccttgctacccaccataccccctgtctcctagtcgactggacttccccacattctcagtgactggctgactgatgaattgatgtgtttattgtccagggagagggtcaccaggcagttctggccccagcctcattggtatgtctgcagtaagtcaaggcctatttattactcatagagtattttgggggtctgtgataaagaaaaaatgcaaaacttaatttcacttccctgctacactgctcattcttttttaataaccctctcttatcagcctcctggcagcttttgcacttcctgtgcatgttaattactttattaattacattgatatctttggttctgcccagcatttcttggtactttttgtttgcaacgtgcacccattttgccttgctcattggcatatgcgggcccagttcccatttctaaaagggattctttgagcctcggtaaacacatggctttcaattagtcgcacaatcatcatttcccatttttcaaatcagccacgtcactaatagagtgtttttaacattctcccaaatagaggctgtattgttaagtttctgacattcttcctcaatccttgttttctctccacgtcacagctcaaagaaccccatataccctagcatggagtgagatgctagacactaagaagtctagggggaggaagcacgggaattgaaccctgggacagatggagacaggggtttgtgagatgaggctggagggtggccttggaccaggtcctgggaggaccttaaatgtgaccttgagaagtacagactttatcctaaaagccaatatccacccaaagtatatggtttagaatattgatcccattagctgtcccaaaataaaagggaatggaagatcatacggtctgaagtttaagaaatcctcaaaactacatatctgcttcttggaaatgtataatatacttttagcaggttaaaggctctggaaagttctgcagttttattttattttattttattttttttgagacagtctcactctgtcacccaggctggagtgcagtggcgcaatcttgactcactgtaacttccacctcccaggttcaagcgattcttgtgccttagcctcccgagtagctgggattacaggtgcacaccatcacgcctggctaatgtttgtatttttagtagagacggggtttcaccatgttgaccaggctggtctcaaactcctgacctcaagtgatccgcccgccccagcctcccaaagtgctgggattacagacatcagccactgcgcccggccttatattttttagttaataaatttaattttatttgttaaaaatgtttaaatttgcatttccaaaacttctttggctatgggaccattagccaaagaagttttagaaatggccaatttaaaattttagcacaaaattaaaatatatagcatatttatacctacctattctaaggagttgaattcaggaagtgctgctggaggggccaaggagccgctgtgggttttgagcaggtgggggcaggcttaggttctgttttagaaagtgacaccagcagtcgagaggataaagggagactggaggcagaggtttgaggaagcccccgaacagttcccgcaagacataatgaggatctaaaccacaggtttaaaatgtttccatgttttctttccattttacttcaagctgcattgttgtcttaaaattggaaaatcagtgctgctataataaatcatagcacaaggattttactcaggcataaaatctgaatgagaaagcaatctgcacagtcttccatcttcaaaagaagcgtttagcccaacagggtattgaaacacagtagccatctgtttctgcaaatctccagagttcatcgaggccttccaatcacacagacccagattcagggcccaggcccacacctttgtagctctatgaccctgagcaagtaggctttactgctctgtgcctcagcttccccatatagtacaaagaggaaataatacttttctcacaaaatagtttcaaaaattgaatgaggtgacatatacagagtgcctagcaaagtacctgactcgtgatgacataaaaataaatgtaattgcccttctgtattggccaggtccaataaggaacctctaaatctcagcagctcagtgcaacaagggtttattcctcactcacacaaaatccagctgtgaagccaggtggttctccagggcagccatcttccatgaggcaactctgtgttctggaccacaacacaaggcagcaggccaatcttgcaacaggtcttcagtgcttcagcccacaagagtcaaatgtcacttccacccacagcccattggccagacttagtcacatgatctcccacacccaccacctaattataaaaaagctgagaatatgcatgagcagatgggatgttggtggcatcagcctctaccactctctcttttctttggtcagttccttgagcctccctgagcctcaggttcctcctctgtaaattaggtctaatacttcctgtcctaccttgcatgggattattacaggagcacatgagattatatatgtgacaaatgctaaattatagttagaggcagttatatgctcactgttttgctgtgccaaagctacctcacattctttggttcatagaaaaaaatgtacaacttcaactttccttaaatctgcattcctgttcttattcccccggccccatctttcctttggattggccactcccttctctcatttggctcttcccaattacttgtcgtgagatcattaaggtcacttatcagtagcctttggtagcctatttttggaatttcgcacaaggctgcatatcctcaaaggtcatgagggacgagatgacaaggaggtcactagagtatttctcctgggcagcagaggaaaatattgggggttctgaatcataggatgcatgggcccttaggtctttgaagaacaccaaagaggtgtgtgtttgtgcttgtgcatgtatgtgtgtgagaacatcatgtgcatgtgtgtgtgtgactattgcaagccccaaaattccataaatgtggacattaaccatgcaatctgccaagctccatgctgtggtttggctgccagataactaaggcaagttcaggaacagccccaggtgaacagggtgctaggcatgggaaggggacaactgtcttgccctactcagatccccttggaaacctatagttggctcagagggcacaactgctgtctctaacctcagaattgctgtgctaggccaggtgcagtggctcatgcctgtaatcccagcactttggaagaccgagatgggtagatcacctgaggtcaggagttcaagaccagcctgaccaacatggggaaaccccatctctactaaaaatataaaaatcagccgggtgttgtggcatgcacgtgtaatctcagctactcaggaggctgaggcagaagaattacttgaacctaggaggtagaggttgcagtgagccaagatcacaccactgcactccagcctgggtgacagagcaagactctgtctcaaaaaaaaaaaaaaaaaaaaaaaaaagaattgctgtcctagagccaagggaagagccccagaggacagatcctgggacagtggaaaaagtccctgaagtatagatttcagctcaaaataaggaagaaagttcacacatttaagtccaatctaaccataaatgaactgggcttccttaggaggtagtgagtgtctcatcaccagaggtatgcaaagaaagactggacagtgggccgttggcagagactgtaccctaaggaagagatatgagagaagacacttgagtctcttcaagcccgaaagttgcgtaaccctataaactagaataatgtaacctcagaagacttatatgtgtgtgcgtgtgtgtgtatatgtgtgtgtacaaagtttataggttcatttctatatatttgttgccagagggtatatgagagatgagttgagaacaggtttatagttataatgaaatcggagcatcctgagcatcactggtaactccgtcatcagaggaggattgcaggcaggcaagaacctggcccagaaaaatgagccccactgcagagcacagaaggagggatgcacactctctggtggcctgctgctacccaggtatccccacacaccgccagcagtggccacagcagccattacgcatcctgttttggaaaagtctttgcaacattgcacttttgtggctcccagtgcactcgcctctctgaatgacaacaggaaaatgaaatgagtatattgttctggaatgcactactctgtgtgtgtgtgtgtgtgtgtgtgtgtgtgtgtgtgtgtgtgtcggctctgtagtcttttgtcttactgtgctcttgcttcatactaagaacagccctcaaagcaggtgaccccagcatttctcagaggagaacccggggctcagggtgagcatgtcacagtcctggggccagaccctagttcaagtgcaaggcccatggctgtccgttacaccagggcactgcagtgtgcccaggctgcctttagccaaggacacactgtaaaatctaagatgtagcagggaacaggagaaggaacacttgaagttcatccaggcagcagcctgccttcctccgtgtgagctgggagtcccagaatcagccagagtcccagggaggagcatgaaaaaccgacagggccctgagcctgcagtcaagatgctcgaggttcagttgccctgaattcttgatgtgtgagcttgggtaagttccagcccactcctgggcttagtattctcctgcgcaaaatgtgagggaggctgatggccctactaacctcctagggtggttgggcagatctaatgaaactgaaaaccttgacattgagtgcacacactcagctgtagtagagtagaatagctctgtccgggatcccacgtggtacagagtcctgatttagagaatcttcgcactctagttctgtcacctctccattcacgccaagctgggcttggacttgacagcagggagtcaccatgaacagccaaccaggttgtgcactgagttctcagcagagccctgtgagaaggtgatgagagacacagcctctgcacggccatgccagggctgagtgggaacagctcagctgcctcaaggtctaggctgggaggtccaaggcctgggtgggagggatgccagcctggacgaggactggagctggacagcttgggcagggccctctgggagctctactcactttaggggccacagatctgaccccaagcccaaggccaaccaccaccctctcccccacagagaggctccttggccagaggagtctggcccagggcaagatgcagctgggtggggcacttgaacaggcactcctaggccaggcaggaactatggggaagagggctgcccttgccagctcagggccacaatcaagtctaatttatggcagggctttccatcctctttcacatcacagcacacaatattagcacagcaccctggtgaccacagagcctgctcgtggctggcagtgcctggcctatccatgtgccccaaggcaggcggaggagagcactgtcgtggggcccttctacccagtcccgccacaccatgaccagggcacactgttggaagatctagattagtggtttagagaaaaggtttcaagaggagttaggcggacctgggttcaagtcacagttccactccccttcactcctgtgtaacgtggagcgggtcactcagccttacggagcctcgtttaatgtcccctaaaatggtgtggtgctggcgctcgtgtctgcggtggttgattgattgggtgaaatgggacagtgtatataacactcagcacagaatctggcccacagtgagcagttagtaaatgtgagggggtcagaggaagtacagatgacaggggtgggggcgatagcggaacaggaaagagtccaacacagatacctctaacacagactaagtcctcccgaaaaagacaggaaggaagatgttttgggcagtggatgtgggaggagcccagaggcctggaggaatggatgcgaacttcaccgtcctatgaagaagggtatcccagggcaaggaaaccccacaataagggcaccaggaggagagatgatggactgtgtcataggaggagagatgatggactgactcatggctgagactgggggatggggaacaaggctggacgggtatgggggggtcagatcatggagggggatgggagccaggatcatggggcccggatgtctttactgcagtctggggagtcactgaaggtcttggagcatggaattagcacggcgcggatgatcacttggaggcaacatagaggaggaatgggttgggaagagacaggagaccaggtcctgaccgagggcaagagcctggggcaggagggaaggcaaaggggagagaacttcacacaggtgcattcacctgcatgtgacaggcggctggatgttggagccagggtgggcattgaagaatgagaaaggctggagagacgccaggttctggtctcacctgggcagacagtgggctgctttctgagctagccaacccagaggaacagcaggtttaagggagaaggcaataaattcagactgggagaggctaggcaggagtagagggtgcccctggtgccccctctgggccagcccagagggcctggaagcagaggaccaaataggatcccctgcatctggccaccaagagttccctggaaatgatgggggagcaattcagcagaactaggctggagagcggtgggaggggaagatgatggatgggagtgtgaggactcctttttcaagaagcttgctgaaggggaagaaagaggggaccaagaggctgagaagcagaaagcagggaaggacgagtttcaggccagggctgggctgtggccctgggcaggggaagggggcaaaagcatgcaagagagaaggcaatcaaggaagcaagtaagggcaaggtgcttttctctctcagtcatttagtgccaagtataagccacacaactgtgctgtcgtcatgttcttactttatttcttctccgggtttaattgacagctgtcaggatcttactgtaccatgccatgtctgagggaccaggttcctcttcagctccttttgtctttctctgtctcctgtcatcattctccccatcgtctgcctgctgggtcagggtcctacagtggtccccaccgcccaccttggctctgcctgctgctggtaggtcaggcttgtccctggactacaggaggaaagcagggctccactctcaggacagaggtggttcagccactggttgcacccacgtgcactcccgggcaatgccaccctgatgacttctgccaggttggggcatgaggggtccaggctgccccatcctgctgagggtggggtacaggcaagagcccagcaaccaggcctgggagtgtctgctcttgtctagtgttgctaccatggaatcactgaatgtgggcatggagggggcctctgaggggaagggatttgcttgcctgaggtcagcaagcagaaacgtccactcaataatgtgccttcaacaaaaatcgggtgaccatgtgaatagtttcttgtcccacgtcagctgggacctcctgggtattgagatccaggaaatattgcctcagaccccccagggccgagtcctgggaaggtcctgagcctgctggagactcctgccctttcccaggcctttcctgtaggctccaggtcctgttcctgggtcacaaatgcaccagtggtccccttacccctcaagcagttcctgaattttattttatttatttatttattttgtattattatactttaagttttagggtacatgtgcacattgtgcaggttagttacatgcgtatacatgtgccatgctggtgtgctgcacccactaactcgtcatctagtattaagtatatctcccaatgctatccctcccccctccccccacaccacaacagtccccagagtgtgatgttccccttcctgtgtccatgtgatctcattgttcaattcccacctatgagtgagaatatgcggtgtttggttttttgttcttgcgatagtttactgagaatgatgacttccaatttcatccatgtccctacaaaggacatgaactcatcattttttaaggctgcacagtattccatggtgtatatgtgccacatttgcttaacccagtctatcgttgttggacatttgggttggttccaagtctttgctattgtgaataatgctgcaataaacatacgtgtgcatgtgtctttctagcagcatgatttatagtcctttgggtatatacccagtaatgggatggctgggtcaaatggtatttctagttctagatccctgaggaatcgccacactgacttccacagtggttgaactagtttacagtcccaccaacagtgtaaaagtgttcctatttctccacatcctctccagcacctgttgtttcctgactttttaatgatcgccattctaactggtgtgagatggtatctcattgtcgttttgatttgcatttctctgatggccagtgatggtgagcattttttcatgtgttttttggctgcacaaatgtcttcttttgagaagtgtctgttcatgtccttcgcccactttttgatggggttgtttgtttttttcttgtaaatttgtttgagttcattgtagattctggatattagccctttgtcagatgagtaggttgcgaaaattttctcccattttgtaggttgtctgttcactctgatggtagtttcttttgctgtgcagaagctctttagtttaattagatcccatttgtcaattttgtcttttgttgccattgcttttggtgttttagacatgaagtccttgcccatgcctatgtcctgaatcttactgcctagtaagattactgaattttagtagaacttcctgaaggtgaggaggagcaggccctttccacaagaggcatggctctcccagggggcatctcatctggctgccaaaacagctgctagttccaggttcttttctgcgcctgcgtttctccacctataagaagagaaactggatcaatgcagaaccccattcgtgtttggaaatggggagacgggagggagatcagggctgtcacagtgactagaggacattcatggcctttagtacgcggggtccaggggttctgtgcaccccacccagcacagaatagtccctcccaacaaataattgctctctgcatccccaaagaaaagtggctggaagtgcccatgttgagaaaccctggtgggtgatcttacatgtcctttccagatctctgattctggaaaaaaaaaaaaaatcacccaaacttgtaatcataacattctacaaaaaaaatgcttacttgaaatgacagcttctagctttgttgcctcagaggtgcggggctgctgctgtggagataagcagtccagcccctgagggatctggaaggttcctcccagctccagcgctctgtggctgtctgcagtgggggataataatgatgctttccacatcaggagcaggctttcccgtctctccagcttgcgagtcacaccgcacctcctttgatcatcttgccagccctgggaggttgtagatgaggaagttatggctcagagaggctgggagacatgtgcaaagtcacacagctggcaagaggtggacttgggatctgagtccagggccctttcccctccctgcctaggcatccttgttggcaccccaaaagaggccatgttgactcacctgccttcccaggaaaggagaaccatctcaaaactctgaaatgcagtctgggaaggccaaacacaccccctaatacacacacaccacacacacacacacacccccaacacacacacacacacacacacaaactcacatttacatgcacacctacactcacccccagcagaaaaacctaccaattttaccatatactttaaaaatcaactttggaatttgaaaaaagaaaagaggcaggtatggcccagggagaaagttctgcatgccaacttctgggagctggtcagaaggtggaaagcaccccctccctcaaaggagcactggccgggccgggctgggctgggcctaggaaccctttccacccacagtggtggcaggaataaaaggtccgagtgacccgcgccaagagccccgtgatcagaggtgaattgcgtggccctcctcatgtgcaccatctggactccccatcctccctgcctgggcctgttgcctcgcccacccctaaccgccctggccagccctgcacaggacacacagaagcacatgattgtcaaggtctggtccagggtcagaaacatacagaggagccctgtcaagtctggccttgcgctaagtcatcactctgtgtcagaggtgtgcgggtgacaaagagaatctgcgttcttaaccagactgcttctaagctgagaaccaaatattaccctactgtttcaaatcctttaaggccttgctgcccaaagggtggcccctggatcagctcctcccctggaactgcttagaaatgcagcatcccaggccccacccgggaccgcgcacctgaatctgcattttaacaagctccccaggcactttgtgctcacattatcgagtgagaagccatgctgtcctctcgcttatcacacttcagcctctctggccacatgagggttcctcaaatatgctgatgtctttgcatttcaggttcttttcccttgccatgccttctgccatgcgtgctcttcccctagcttttcacatggctggcatttcttatctgccgggtctcagactaaatgtcaccactgcagagtagccatcccaggctacctgatctgaaacaacttccctcattagcacccctccaagtgcccgtagtttcctttaggaatatttatcactgtttgtattcataactgtactgtgtggtttgttgaatgcctgtgtttgttgagcagcccccgttccactggaatgtaccctccaagaaggcaagcgccatgttggtctcattcatcctgtacccccacaccaacatggtgcatgacacacagcaggcacatgacaaatcctcatggagtcgatttcgaatgaatgaatgtaggacaaatacagtcatgaaatgtaggacagatagagtcatctcccaatgactcagactcccattaactacactgtaaatcaacccatgggctcccttcacaaatgggaaactgaggtctagaaaagggcagggatttgcccaagatcacccagcaagtctgtagcaggaccaaggcttttgacctttcaggcctcaacacctccacttatgctccaactccctgcctgtcagtttgtgcagccggacagagcgggatatttgcagggggcactgacctacattgtgagtaattgcattatgcagagggactctcgggccagctgctctccttttgccgcacagatgggagaggctttccccggcagcttctgcgtgcctcctgctgagcagcagcctgaccagaagtcaggtgtgagcacttccatcttctggccgtcccaaaccggtgtggcctcactgctggacacggtgccctgccaggcaggaaagagcattttatcagcctgagttcagctcgcagcaccaaagcgcagccttcaccctaaagctctgggggcttcaggggaagccactgttgaatatttaacgattaagttcttcctccctcaaataagcactttgcagtttatagagccggttacacccactgtctcctccgatttgacacaatgatgcacgtgagaggagggcacatcagggaaggctcatggtgaaggaggagggagtgctggtttgagagtcacacacgcctgggtttaatctcagccccgagacttactagctggagatcttgggcaagttacttcacctctctgtgactctgtttcctcatctgtgaaataagtataacaccttgttggatttttgtgacttcaacaagatgacgggtgtagagttcccaacccagcagtgagcacatcattgtcactcatgataaggcagctcttggtgtccttatggctgatgttatctggtgaagtcagccctctctctctgaggctgcctctcatgggaactgtcctggtcttactggaatgggagagccatgaggacagggctcttgtctatccaggttattgctgcatgcccagaacagtatctggcaaatggtagtgcttaacagttattcactgtatgaatgaatgaatgaatgatttcttaggcaattgccaaagagagcaacaagtaaggaagaaaaataacaaaagtggccgggtgcagcggctcacgtctgtaatcccagcactttgggaggctgaggcaggcagaccatctgaggttgggagttcgagaccagtctgaccaacatggagaaaccccgtctctaataaaaatacaaaaattagctgggcgtggtggcgcatgcctgtaatcccagctattcgggagcctgaggcaggagaatcgcttgaacccaggaggcagaggttgcagtgagctgagattgcgccattgcactccagcctgggcaacaagagtgaaactctgtctcgaaaaaaaaaaaagccagttgaaaattttgcaggccagctatccagagcaagaaaaacattctaagggcaatgcaaatgctgtcctgtacagaagagaagaggccgaagcccgggcttaggccctgaccctgatgtctgcaggggtcagtgccctgtgctcgctggccctggcctgcgtggacagtccacactgggaacaggccgagtgcagtgcccaagtatagcctgaatacttccccaacagctgctccagaagtgggggagtcccccatggtgcttggaaatctggcctcatgtaaggccagtgggtgccttccagagtagcacaagatgctgctgacagcttcaccgtttccggccccaccgatctatagtagttggtagttctgtgtccccagcagagggtaatccaccaccaccaggctggacccttcatgtggctctttggtgccctctagtggtgctgctttggtgcacgacaatgacaaggaagcactgggggttggggggtgggtagcccacctgcccctgcaggttgcatgctcaggtgcatctctccccatgtgtggctgcacagaccactgcgaactccaggcccaggtagaatctggatggattagacaacacctacagcttgtacagtctgctttgtggttcagtgcaggagtcacttgattttcttccagatgcccattgccagcctcacaggaacaggaacatcatcactcccaaaactatcccaacccctgccaccgtaacctctgacctgtgacagggagatggggctgcatgaggatgacattagtgaccagaacatttttgcagtttatttctggatcagcacctgaatatggggaaggtgggtgtgggagcagctcggccaccccaggaccactgacttccatgaactctcagtggacccatcgtgtttgtttgctaccctcctgccaggactgtgcttaaggctgctgagatgggtgcggaactgaaaggccaaagataagaattcagatttcaagattccgagaggtcagagcggtgaaggtggggttgcgggggaaggggagcagctaagagaaaggtaaaggtagccaggctggaatgtcagcagcacagggggaaagactgggctagcagcagttctgtgaaaactacctgatgggtcttggtccaacctgaaggaacacatgaatcactggtggaagattatatagaaagccaaggagacccagagaaagaggtcaagctgacttgctcagcacttgacttgctcagcactgcctggagtactgagctccattcaaagcctgtaggagtggtaaatctgtagagcagtggtaaactccagcaggttgactgacaaggtggcctgggtggaggaaggcacagtggtgtgtcccctctctgtagatcttccctcctgtggaaggtgtgcagactcaaagagagagcttggaattattctggggaaccccaggggagagatgagccccggtgagtggaggtccaggaggagaaggctgtggctccgtgaaagcactgtgtactacctcaccgggagcaggagggaggggctccctgccactgcagtgtgtaagccaggcaagccttgtcagtttcctgtgaagagcacttcatcccattgagcaatgctgtatgacacaactaattttctccacaccgagaatctaagattccatcataaattactgctgttcattgtagaggaaaagacaggatcaccgttaatgggtttgccattcatgcataactggaatgggtccgtgctactgcatgatgttggcctgattgtcacacactggagaaacccagattctgccactaagtcagttgaccttgggaccaagccagttctgtcaccttaattaaacaatgaaaggatgtcaggaaacccccattgcccttaataaaatgcagcccagctcctgggtgggtagcagtggaggggaaatctctacccctggccactctgactttagtttctggagatcacctccctccggggtgtttcttactgcagagccttcaggaaaccacattatcccctctagcactccagcccaagtgtggactcaatgcacatggacccaaagaggttgagctaaggctttctgtggcttgggacagcgaaaggcaaatcaagcctgagagaacacacagcaggatgatctggtcaaaaaatggcctgaacccccaggtcccacccctcctagctcctcctgctttcacgtgggagcaccatctttcccccacctcacagaagcccaggtccattgcctgcttcaaaggtcacacctggagagcaagaccaaaaaactagtttctaaacgctacccgtctaagacctgccttctacccctgggtcccatcaaagtaccttcttcctagtgattgaccctggggatgcccatgccttaccctcaggagtgtggctttaccctgggcctcaacagcacaactccatcagaatataacatcctgaacacagttatttggtgatatactcccagtggcaaacagattgcaaaggaatcttcaactttacttagtaagtttgtgcttgacagttgtatggatgtatcaattttgcaactatttagtgtctaatgtaggactgaacaaatcagtaaatattttgatgttgttcgaaggcagggattccactgttggagaagagtgatgaaaatatggaatggggaaggcaagcaagaactcggcagtgttggatcttatctagacagacagacagacagatttatttttaaaagagcttagaagtagtgacaacttaggaacagtgagaccatcaagtgcctacatcttggtttctaaacaccattctccactaaaaagaacaaggactccttggagaaatggttgattgcaaggctgggagcaagaagagttcaaggagtgctggaatcgttgtgccaagaagtaagaaagtgctcaaaaaaattatggtgatgtgtggaaaaaacatagaaggcagcatgaagttgttttccactggcccaatctggaaaaatttaagcatcaacatgaataagatagcaaaggattataagacattgaattaaaaaggaacatactaggccagacatggtggcccatgcctgtaatcccagccctttgggaggcggagacgggcagatcacctaaggtcggcagctcaagaccggcctggccagcatggtgaaaccccatctctaataaaaatacaaaaattagccaggcatggtggcggccgcctataatcccagctactcaagaggctgagacatgagaattgcttgaactcaggaggcagaagttgcagtgagcggagatcacgacattgcactccagcctgggtgacagagactctatctcaaaaaaaaggaacatactgatatacataaataaatgggaggaaaggaaagctcttctttgcagtagaatgccaagtgtttaaatagaatggtagagttagaaaatcaccattttgcagctaccaaagtaataaatgactcaggtaagaattatcaatggttgctgaaaccactgcgtgaacatttgtgggggaacaggatacttacacagtctcaaagtagctcccacagattatttattaattacaaatggggaaatgatacctttgaaatggatgtctgacagaaatcatgtcaaccaagtgatcacagagtgccaacgcgtccccctgatgtgactcttacttatgtaggattcctgacaagaatacataaaatctgaatataaaacattcaggctaatccaaattgaggggcttctacaaaataactgaactagatttttcagaaacaatgacatgaaagaccaaagtaggctgaagaattgtttgagattaaaggaaaccaaagacacgtaagtgcaataatgatgctggattggatcctgcattggaaaatccacagttgctttaaaggacgttattaagccaattggcaaaatctgaaaatggctagtatattagataatacactgtatcagtgttaaattttctgaatttagtaagtgtatgtgattgtgcaagggaatcccttgttcttaggaaatatatgctaggatattcaggggtgaagggtcaggatatctgcaatttactctcaaatggttcagaaaaaaataaatgtacagtagatgttgtttcattccctgggtgtctttttgtcttgttgccaccatctggccaattatctcccagagtttcccaattcaagttcctgccagagagaatgtgctcaggagggatcctctccatcaaccctcattaggcagagcactttgtaggaggaaacctcataggtatctgacaagcctctggattggctgcctggggtcaggtgcccattctttgtccagtcagctctggccaaggatgagtcatgtggtacacaacctggctgccatcactgctccagcagtggggctgtgggcaagagggtctcctcagaagggtttggcaggccccaggcttgggcaggccagtatatcctatatctccagttgcacagaggtaaccccagagatacctgaagacctcctgacctaactttatacctcattctcacaacaaatattagcggtacctgcattgggccaggttttgtgttagatcctaggggcaaagaagtgacccagttcctaccctcaggagctctgactcaaattggagaggcatgaattatgcagagaactggagtgcagggttgaattgctaccaacaaacagaaggcagtcaacgctagttgaggcctgggctccacaccttaggaacacagagatggggtccaaatggcctgctgaacagtggcattggctatggctcacaggagggaaaagggctctcagataaggacccagttgctggaagagtgtcctgtgccatccctgagtctctgttttctctttgcacagccggacccagcaggacgggatatctccatccgccctctcctggagcactgtgagaacacccatatgaccatctggcttggcatcgtctatgcctacaagggacttctcatggtaggtgcagagcaggagacagtgttgaggggggacacttctttgttgggcctctgtctcccaggggcctccatcaatgtaaaaataaacagagcctccatgactaagcagttactctctgtggactcagtgcctgccacatgctatctcagttcctgcagcaaccctatgagataggtacaaataacatcctcatttcactgatgacactgaggcttggtgtcttgcccaaggtcatctggctagtaagtggcagagtcaagatcttaaccagagagtaacccaaaaactcgtggctgtgccttacagctgtcactgcactactcccaggaagagcagtctgccgacatccagtgcatgttcatgtccagcatttcagcggaccctctcttaagtccatgggaggtgggcaggatcatccccatttaatagatgaggagggtaagcctcagagaggttaaatgatttgccaaaagctgcctagtaacctccaaactgcaaacccagcactctttccactttactcatcttttgaaatcaaagatcatgctaggtgctgtggctcatgcttgcaatgccagcactttgagaggccgaggtgggtgggtcacctgaggtcaggagttcgagaccagcctgaccaacgtggcaaaaccccatctctactaaaaatacaaaattagctgggtgtggttgtgggcgcctgtaatcccaattactttggaggctgaggcaggagaatcgcttgaacccgggaggcagaggttgcggtgggccgagatcaggccattgcactccagcctgggcaacaagagcgaaactccgtctcaaaaaaaaaaatcaaagatcacataccaagcccacgttgtgaaattccaacattaggaagaacttgaaaggtcagctccaccatatttcagcccaggttgatccttgaatcttctctcctatatcctatataaaccatgcttccactgaaagccatctagtgacacaaagctggtcactgcgccctcctcagatctttccacagggaggttaagtcaccattcacccccgtttgaccccacttagaggccaaaaatgaagccctctctccaaaagtcaaataaactggaatctcttgtgctgctcaaatgcattcttacctgctgctgcatcactgaagtgttagtgattgatcctgtgtcctttgagaggccatgccagaagggcatgtaagaggaccctagacaaagattggtccccacttcataccagttgacacccttttatggttttccatagaagtcttttgagctcccatgcaagcaacaggaccactgggctgcaatctgagcacaaggtaatgaccctgggggtgtccacaggaggtacccaatatagaaataggaacttgaggactggccaaaggtcctgggtttggacaaggacacactcatagtcaccagaaacttggaagagctctcagcaatgggtggcacagacctgagggcagaaccgtcagccccaagcaaagttgctggaaggcagactccatctccatgtaaagatggattcttgtaacaggcagccctgtccatagatgccatggagcccctaagaaggacaagctccctgtcatgggaaagcatgtcatgtcaatgacctgtgcctccctgaccctggttgaatagagagaatctagactgtctccgtgatccttccatccttaatgttccttgattctgagactcattccgtgaaaatagattacgatgaatcatattgacatctttaaactggatttatttgtaatgttttgatcattcattgtcttctcccacctacttccaaagtggttggagatgagaaatgactgtatgtcttcccgtgaagctaacagcttcagccagctcatgtcaacaaaagctatatttaatagcacaaatgcttcaccatttagaacatgcaaggaactgtccccagcctcctggcccttaaggtttatgactaaaatcccactgccatccccctaatccttctattttagagccacagaatctcaaggctgggagaagcacacacagccctttgggtccaccccactgccagatgttttggccccaatccccagcccaccctgagcatcccccaaagcattcattgactaactgcttctatacctccagtgatggggcgctcgccctcttcaaaggagcctgtgccattcgtggatgatgtgttcgtttcctttggctgtcataacaaattaccacaaaacagtggcttacaaaacaaacagaaatgtattctttcctagttgtggaggccagaggtccaaaatccagacagacacttgtggtccctctgaaggctccaggagagaatccgtccttgcctcttccggcacctgatggttccaggcatgccttggcttgtgaccgcatgactctagtttctgcctctgtctccacatggccttctcttcttctccccaaggtctcctttgtgtgtcctttataaggacacttatcattggatttggggtccttccagataatccaggatgatctcatctcaagatccttcattatatctgcaaataccctttttccaaataaggtcacattcacggttttccaggaattaagatatggacatatcttttagagtcaccattcaacccacagatggagtgcttttctagaaagttcttcctaatcctcagcggaaatcttcctcagtgtaacttgtgcccatgaaccctcattctactttttgagggcctaagaacaagttactttgtgtttcctcctgacactctttagagatttacagccaaccaccaggtccccagagtagcccacatttattgtggagaccttcacagtggcttggtggcccatcagtagcatggctgataggatctctgctcactgcaacctccgcctcctgggttcaagcgattctcctgcctcagcctcccaagtagctaaaattacaggcatgcaccaccatgcccagctaatttttatatttttagtagagttggggtttcaccaccttgcccaggctggtctcaaactcgtgacctcagataatccacctgccttggcctcccaaagtgctgggattacaggtgtgagccaccatgcctagcctggttccccattttaaaaggaattttttaaaaggaataaatcaggctgtgagataacacatttagagaaaggataaaagacaagggagaggaaaacaatcatgcttgtataaaataagatcaattacaaatagctttgaaattaccttggtacagaacatttcagtctacagagtgctttgacatccatcctcccatttcatccacacacaaaccctgtgacatagatattattattattattattcccagtccacagacgttgaaagtaaggtcctgagaggtgaagtgacttgcccaggtcacccagccaacagatggcagagcagattccatatcccctggccttgtgtccagccctgcttctaccacacagcgttatgctgccatcgaatctctaaacacaggtcctcagtgtgatgttaaatggttcatgcagctgtcagacgcctgaagctgccctgctgaagccgaagggaagaggggcctttgtgagagagaaggcctcttggaggggctgcactaaagcagaggtccctgtaccagtcagccatcttggctcttcctcctgcccaccacaccaccattctgccctacacccacctgagctgtccctgcagcccgccctccccttagaccacccataagggttaaaccctcgacaccctgcttcagatcatagttggcctctaccctgtccatttctgtcaagacatctattggttaggagtagagctgcaagtcacagaaaaacccaaaataataatggttgaagagacaggaaatgttcctctcaggtaaacctagtccagaggtaagcagtctagggctggggtaaggctcccagaatctcagttccttgcatcttgcagcccccacatcatcattacacaggttccacgtcatagccttgtgatctaagacggatgctgaagctccacccatcacattccactccagctgttaggaaggaggaaaagcaacacctcttccctttaaagacacttcccagaacatgtgcacaccacttctatttacaggcattgtccagaagctagcaatatgccacgcctagcctctagggcagctgaaaaatgtagtcgctattctgggtgtctgtgtgtgcttggggacaatagaagtctcagacacaagggatctgcttagtttaatagaaaaaagactggagtgaatttctaaaaacacagcccatttttgctaccatattgctgtgcggccttgggcagacctcttcacccttctggatattagtattccctagagagtgagggagaaagctgagatcttatctgaagttcccttccactgtagccttgggcaggtctgtgcatgaaccagtcataggggtgcaggagaactggacagctgtcacatccccagtctgcatttgctcagcaggactcagcagggccacaagtggggacagatggtgacatccagaagacccggctgacagcaaggcccccgaccctccctccctgcagcccacctcctgagtaaccctccactccacagcttctcagagcagcctgtgtgtgccaccccttggtaacgatcatctctcccctttctgttcaccatttcagttgttcggttgtttcttagcttgggagacccgcaacgtcagcatccccgcactcaacgacagcaagtacatcgggatgagtgtctacaacgtggggatcatgtgcatcatcggggccgctgtctccttcctgacccgggaccagcccaatgtgcagttctgcatcgtggctctggtcatcatcttctgcagcaccatcaccctctgcctggtattcgtgccgaaggtacaggcgctggccccaccacctggcctctgccctctgactccagcacaggggcattgctggcttttctccattctctaaaaggtttacccattcctttttttttttatgatgaagacaattcacattatagaaaattcagaaaatgcacagtagtaaaggccaggtttttcagaaatttcccatagtcccaccacccaaaaatcatcactggtcatgttttgttggggtgttctttactgttaatgtttttgatgtgtttccttccagcctttttcttaatggctaggagatgatgccttttttttttttccctcactctgccacccaggctggagtgcagtgtgtgatctctcggctcactgcaacctcaacctcccggaatcgagcaattctcctgcctcaacctaccaagtagctgggactacaggcttgcaccaccacgcctggctaatttttaaattttttatagagacggggtctccctatgttgcccaagctggtcttggactcctgggctcaagcgatcctccggccttggcctcccaaagtgctgagattacaggcatgagccacctcgcccagcctatggtgatactttttaagatatggccataactatagcacacattttgttctttgcttaatgttttgtcctttgtattttcccacattcataactgtcattgagggaatttccttaatttacttgcccacttgatcttatattggtgagcattggattttagaaatgaacattttttctgcataacacagtttccttttttccaattattcctttaatgtggaatcacagaagtagtattgttgggtccaaaaaaataactgtttttagtagccacttatatgttccatttatttgaagggctgacctttaggaccaccttgaagagaaatttttcgaacatcatcctaccttgcaatgggtgggtgagccagaggcctttcttcttaggagtccctgcagtagggtgatctgtgttgagggaagcctgacctaagtgagtctcaaaagtaaaggaaggtggccaggcatggtggctcgtgcctgtaatcccagcactttgggagaccaaggaaggaggatcacttgaggctaggagttcaagaccagcctgagcaacatggtgacaccctgtctctactaaaaatacaaaaaaaaagccaggtgtggtggtacacacctgtagtcctggctactcaggaggctgaagtaggaagatcacttgagcctggaggagcagaggttgtggtgagctaagattgcgccattgcactctagccttggtgacagagtgagaccctttacccgcccctccaaaaaaggaaagaacaggacacagagttgcaaagctgggaggggttactgacccaagtgggaggcatctgcttcagagcaggggagaggaaagatcatctgggtccatttcagcaaacaggctacccatggtgcctccatcctcctggacatgcagtcagcccccaggcactgtgagctctgcactggaatacctctggtgtacacaccttagtcgtccacacctgcccagcctaaaggcaacaccgtgacttctctgcctgcactctgacattctttccatcctgtaaaagaggccagatgattctctaagccaagcttcaattgcggcactctgctctgttacgcccaatagctccccattgtcctcctggctctaggatcaggtttctgatgttgggctggctctcaggacccttgggtctcctctagtctccccagagaaccctgtccaccacccagcctgcccttccccttccatttaccccaggcctccctgcgttgccagacaccagttcttcccttggagttcccttccccccaccatccctccagaccgccctcaaagcccagcaggccatggcactgtggtaggctgtccctgatacccgctggcctggtgaagattgagtccttccttcatccccatcccacgcctctggaccatgaagtcccaatgggcaggggccatgggtcactcagctcctgctttccagagctgagcccagagcctgcttcgaccggagatgtttctagaataagcgggtaagggtcaagtggcaactttttgttttctatacaaaatgttttggatgtagctaagcaatgcccagacccctgactcacggaaactgtgagataataaccatgtgttgttttaagctgctaaaaaacaagcttttgtcagtgacagagcttgttactagcctgcttccagaactcatcaatggtttaacagaggccttcgctctcctctgtctctttgttgtcacaactgttgccctcggggcttattttttccacaaggagcaaggcctaaggcagcgtgctaggcagctggagtgaggcctcgggggccctggttgggatgcaggtggcatcagggtcaggagactagactcttagtgaccaggaaggacatggaggcttggtgaggggagggggcctgccccaggtcacacacaagcgagtagcagagtctggcctgagcctaggtctcctgactcccagcctgtggctttcctggggcctcttatcgcctccagagcaggatctgctgggagagtctgccatgtgggatgggaggaaggactcaaggctctctcttcaaccccgccccaacctttgtcctttcagctcatcaccctgagaacaaacccagatgcagcaacgcagaacaggcgattccagttcactcagaatcagaagaaagaagattctaaaacgtccacctcggtcaccagtgtgaaccaagccagcacatcccgcctggagggcctacagtcagaaaaccatcgcctgcgaatgaagatcacagaggtacctccctctgcatctggtagctgggccctgtctgccactgaagcccctctaaccctgtgcggggactctcaggctcctctagaccatccctgcagcatgaccgtgcagtctcatcagctgcagttgcagctgcgagagccaggggtgacataaaccacacagaggcatttgtcagaatccaacatgagcttattgcccacctcacccaggctcttggaggccagcaacacctgattcaagccatccccagacagaaaggaactcagggagatttgtgagcttctggattatcatagcttcctacgtcagtgtctctttatctgtgtctctctccctctcagtttttcactctcccagcacaacccagcaaccaccacatctatgtgatgtacaagagaagagaaagtgaaaagaaacttttcaagagagagtgctgcagcagacctcgcctttgtcctgagggttctcaactggttcttgaatattccagagagaccatagccagattgccttgtgcccaagccaggcttggcttgtagaccagggaagggaaaacaaattacctcccctcctctacccctccctttgggttggaggtatgcctgaacccgtgctctgcaggctgtgtgttgctttaatagaggaattctgattagggagggggacaggaaagggaccaaggaaagtacattggttacaatgctggctaaacaaggccccaaaataaagtggcccagagaaaatatgtttatttcccttttacctaatggccgtgaaaagagagggcccggttggggcagctctgctccccaaggtcattgctgggcttggttcctgccctctggttttccccactctccagggtgttctcttcattcatagcgggagagctgggtggacagcatgtcctgttcacagtgtcaggaggggaagagatagaaagtccacatgagggattgccttttaagcagtaacaccaaaaattgtgcatattttggttctgccctagtcacatcaacaaaaactgacatgagcacacctagtgagaggagaggctgggaaacgtcgtctctagctggacagctgcaaggaagaagtgagacatagggttgccagattagatatgggatgcccagttaaattcagacttcagatcaacaaccaatcatattttcagtaaaagtttagcccaagtaatacttgaatatacttatactaaaaaagaacccattatctgaaactcaaatttgactggacattctggatttttatttgctagatctggccgccctttggggggctcacagaattctgccacagagagccaccatacagttgtctgtgcacctaaagatgactgctttaggatgaggtaacccaccatcagctgccagagcaaactaagaagggtttctgtcccccaaagcccattacaggctctgtttcaatatcagacctctcctgatgagtacgaccatgtcactgcatttcacttctacttgcacacttcagcaatgaagagttcagtcacattaggaaacccaggccactatttaaaactcttaaatgttgtgttatttttcccggaaatgaatcacaatctggcctcctgttgtccccaccctttgatcctactcctgccatttaagtcacatagaaaagagtatctctttccctcctcctccacatgaaaacgtgttaaacaatttcatggctgtgttcctgacatcagaacagcctctgatagtttatcaggtctcctcccttatactacagcaggatgctgtttggaaaaatcctctaaccatgtttttcctgtgctcttgcaccaacacaacagtcaacgcagaagacttctgtgaccaaatgtgtgtggggttttccccaccaacgagcagcaggcacccgctgggtgcctccagttcaaatccaatgctacatatctagagatagcttcagatcccacaggttgagggctcagtccccaaggctccccctgacccccaccctaccctcagataccagtcataagtcaggcctctggaacttctgaccagccagcttcaagttgggactcccaggatcctgctttgggttgaattaatttgctagaggggctcacggaacccagggaaacacatttaccagcttattaccaaggacatgaatgaagagatgcacagagcgaggacgggtgaaggggtgtggagcttccctgcctccctgggccccatgctccaggaaccttcacgtgttcagctacccagaagatcttcataccctgttcttttgagtttttatggaggcttcattacacgaggcatgactgacaactgtgtagaaatgtgattggacaaaaatgcatgatctaaacccagcaaggcctttctgctcagaattttcttggcctctctgtagcattccttcctccagggtatggggcaagactttctctctgtgataaaggtcttttgacctacatcagattacagtcctgccttgagcaggtgagaaaggacaggagaaggtcagagagagtgattctgtttcatgaggcccgctcctgaggcctaaaatgccccaacattataacaaaagactcttacaagagatatagcagccaggaatcatggatgaaagccattctattatacagatatggtaatatcacagatgttcaacacccatcccgactaccacccccaacaactaccaacactcatattgcccaggcttctctggggctgaattgcccccaggacttgcacctgatttttgtataacctgggaatgggccaggtgctgtggctcacacctgtaatcccaacgctttgggaggacaaagtgggaggatcgctcgagcccaggagttcaagaccggcctgggcaacatagagaagacttgtctctaaaaataaaaacgtggggatgactgggacccatcctgattaactcctctgagtgagaccctgcaggtcagagtctccatgatagtgtgaggctcagagctcgcgagccctgcatgtctgtcctccactgtgggtcctattaagtatcagtaatagtaattataaggccaggcacagtagttcatgcctgtaaacccagcactttgggaggccaaagtgggaggattgcttgagctcaggagttcaagaccagcctgaggaacatagagagaccccatctctaccaaaaaaaaaaaaaattagccagacatggtagcatgcacgtgtagtcccagctactcaggagggtgagacaggaggattgcttgagcctaggagatcaaggttgcagtaagctataattgcaccactgcactctaatctgggtgacagagtgagaccctgtaataatagtaatattattatagtagcaagttgcccttattatgtttcagacactgggctaaactttccatgtattatcttgtttgatctgcacaacctccccctgaggtaggtactattattaccccattctacagaaaaagaaattgagactgggttctcacaagccagaagaacatcactgcaagtaaggggcagccttgggtttgcataagtcctgtccagagccttagctcgtatgctctccctgcccttcctccctgagcttgcttgtctgcttcatcaaggcccaagcctacactgaacacataattgcaaagcccaggtccctcttatcatagcttctccttgaacaaagagccgccaggatccttctgcatctcctcaccaaaatgcagtaacccctctgattctcagggcactcctgaatacaggtaaaggcccagccctgtgagctaccttttggccctagtggcctagctgccagggctgggccagggacctgactcaactggaacctttgtcttgtagctggataaagacttggaagaggtcaccatgcagctgcaggacacaccagaaaagaccacctacattaaacagaaccactaccaagagctcaatgacatcctcaacctgggaaacttcactgagagcacaggtaagagagccagggccccagaatgtggtagggaccttggtttcaaacaccagctgttcatcttccattttttagatgaagaaactgaggctcagacagggcacaggactggtatgaagtcacacacacagagctggagcatctggaacctctgtctgctgaccacagttcagtgtccgctttgagccccaccctgcctgggcctgggtcttcgatttctcatccctcggcttgcagttccacacctacacagtggggccagcattcccagtgtcctgactgggggcaggcacattttattttcccttttgttcttagcgaatagtttaccctttcttctctgaacgatatttcacagtttcaaacacacctcatcaatgtgcaa

SEQ ID NO: 1808 - protein, 393 aa, Homo sapiens
MSPEGQGRDAPLFVQPDRAGYLQGALTYIVSNCIMQRDSRASCSPFAAQMGEAFPGSFCVPPAEQQPDQKSGVSALCSLALACVDSPHWEQAECSAQPDPAGRDISIRPLLEHCENTHMTIWLGIVYAYKGLLMVAWETRNVSIPALNDSKYIGMSVYNVGIMCIIGAAVSFLTRDQPNVQFCIVALVIIFCSTITLCLVFVPKLITLRTNPDAATQNRRFQFTQNQKKEDSKTSTSVTSVNQASTSRLEGLQSENHRLRMKITEVPPSASGSWALSATEAPLTLCGDSQAPLDHPCSMTVQSHQLQLQLREPGLDKDLEEVTMQLQDTPEKTTYIKQNHYQELNDILNLGNFTESTDEETEAQTGHRTGMKSHTQSWSIWNLCLLTTVQCPL

SEQ ID NO: 1809 - DNA, 1066 bp, Homo sapiens
  source (1)..(1066)
  CDS (201)..(866)
cggccagtgttgccgggcacttcctggttcccgcgcgccccgggtgcagctccctgcacccagtgctggcgctcctcagaagggagggggccagaggcgagatgtcgcaaccgcctccctccctctttccccgccttggcactcagtcgcctcccagatgagcactctctcagaccgctgcgggccgccaggcgccgggaatgtcccctgaatgcgcgcgggcagcgggcgacgcgcccttgcgcagcctggagcaagccaaccgcacccgctttcccttcttctccgacgtcaagggcgaccaccggctggtgctggccgcggtggagacaaccgtgctggtgctcatctttgcagtgtcgctgctgggcaacgtgtgcgccctggtgctggtggcgcgccgacgacgccgcggcgcgactgcctgcctggtactcaacctcttctgcgcggacctgctcttcatcagcgctatccctctggtgctggccgtgcgctggactgaggcctggctgctgggccccgttgcctgccacctgctcttctacgtgatgaccctgagcggcagcgtcaccatcctcacgctggccgcggtcagcctggagcgcatggtgtgcatcgtgcacctgcagcgcggcgtgcggggtcctgggcggcgggcgcgggcagtgctgctggcgctcatctggggctattcggcggtcgccgctctgcctctctgcgtcttcttccgagtcgtcccgcaacggctccccggcgccgaccaggtgagcgcccctctgtgtgtgccgggcaggtgtcctgcgcaggctgggaagcggggccccgacggaagctgggatgaggatgatcaagaacaacaatagccatttattgcacttaatcgttgtgccaaatcttgtgcccatggctgtgaagtttaatctcttaaatctcactacaacgctgtgcacacgccctcctaaatgatgtaagtggagtcccccaaattcttgcaaaatgcaatgactgttgcgaggttaattaacgagtagtttaggagcgagacggaactttgggggtgcag

SEQ ID NO: 1810 - protein, 221 aa, Homo sapiens
MSPECARAAGDAPLRSLEQANRTRFPFFSDVKGDHRLVLAAVETTVLVLIFAVSLLGNVCALVLVARRRRRGATACLVLNLFCADLLFISAIPLVLAVRWTEAWLLGPVACHLLFYVMTLSGSVTILTLAAVSLERMVCIVHLQRGVRGPGRRARAVLLALIWGYSAVAALPLCVFFRVVPQRLPGADQVSAPLCVPGRCPAQAGKRGPDGSWDEDDQEQQ

SEQ ID NO: 1811 - DNA, 889 bp, Homo sapiens
  source (1)..(889)
  CDS (201)..(689)
cttaccatcatagaccgataacatagccagttttacttgcttgtttcttgaattccttttccttttaatgtgagaaaaggctagcataagggcaggaatgaagcaggtgcttaatacttgtttgtattcttttctaacctccctacaaaactagtaagagaattgaaaacatagatgtactttgataaattgcctagcatatggtatctgtttattctgtttttgtgtttagacttttttttttttttaaattaagtctaatagtttctgtctctctctctttttttttttttaggcagagtctcgctctgttgcccaggctaaagtgcagtggtgtgatctcagcccactgcaacctctgctccccgggttcaagcgattctcctgcctcagcctcccaagtaggtgggattacaggcacacaccaccatgcctgggcaatttttgtatttttagagacggagtttcaccatgttggccaggctggtctcgagcttctgacctcaggtcatcctcccacctccacctctcaggtagctggaactataggtacacaccgccatgcctgtgtaatttctacattttttgtacggatggggtctcactatgttgctaggctggtctcgatctcctgggttcaagggatcctccagccttggcctcccaaagtactgggactacaggcgtgagctaccctgcctggtttttgctaatttccaagacaaaaatatacagcagtgttattactttttggtgttaatttttatttttttcctctgtgattaatatttgttctgtatttcagctttccttgtgttttttttcttctaagactataagactaaatctttgtatatcttcttattgctttttttttttttttttttga

SEQ ID NO: 1812 - protein, 162 aa, Homo sapiens
MVSVYSVFVFRLFFFFKLSLIVSVSLSFFFFRQSLALLPRLKCSGVISAHCNLCSPGSSDSPASASQVGGITGTHHHAWAIFVFLETEFHHVGQAGLELLTSGHPPTSTSQVAGTIGTHRHACVISTFFVRMGSHYVARLVSISWVQGILQPWPPKVLGLQA

SEQ ID NO: 1813 - DNA, 949 bp, Homo sapiens
  source (1)..(949)
  CDS (201)..(749)
agcctcatgcacacagtcattaccctgtgccaggctgctacctgagccaccggcccaggcctcctgcctggagcacaggcgttcacagccccactgcctcctgcctcctaagagggtacagctccagttccccttccagggagcaactccctccctccagcacccacagcctctgggaagggccccaagtcagctcctaaatggggtggggatgcagcggaggcctcgggagacggatgcccctcctcaaaggcagagtaggggcatgggctctggagcaattctgcacatgcgtgtttatgtgtacacaggcatgtgtttgcatgcaggcacgtttatgcatgcacaggcatgtgtgtgtttgcatgcagatgtgtttatgcgtgtacaggcatgtgtgtttgcatgcaggcatgtgtttatgtgtgcaacggcatgtgtgtttgtatgcaggcatgtgtgtgcatgcaggcacatgtttatgcatacacaggcatgtgtgtgtttgcatgcaggcacgtgtttatgtgtgcacaggcatgtgtgtgtgcatgcaggcatgtttatgtgtgcacaggcatgtgtgtgtttgcatgcaggcatgtttatgtgtgcacaggcatgtgtgtgtttgcatgcaggcacatgtttatgtgtgtgtgcatgcaggcacgtgtttatgtgtatgcaggcatgtgtgtctttgcatgcaggcatttactcagatacattcacacacaggcctataaacacgcatcatctctaggtcattctggagcttgagtttgaggcttccccacatcagagatgcagcagcgtccccagtccagcgtgggccctgctggcttctcaggtgtggaggtgaggaggcagcagggaggctgccagcgctaggtgccatgcggttcttggctctgcaggcaccagctatgagactaggagcccagat

SEQ ID NO: 1814 - protein, 182 aa, Homo sapiens [sequence omitted]

SEQ ID NO: 1815 - DNA, 1108 bp, Homo sapiens
  source (1)..(1108)
  CDS (201)..(908)
aagtaccaacacagcctaattggtatttatattaaatctgggtggaatttctaagaacttgctgctaatgttgtttttaattttaacagcctcaagtactacagccttccagcagccttcccagacccacagatcacacccagggaaaactaataaagccacaacgtatcgaggcccgcagtgaatgctcaatccaagacatgcatcagggcggtgcacatccggaagaaagctttacacacgtcttgcaccaagaaagcaactatggtttggaagagcagcctttttcatcaggcccacaattaacaatggatgtggctaagagtacaccttctgaagcaaacttaaacattactgtaaatgctcaagagccttatcatttggcaaacaatcaaattagtgacatgcagtttatacccacttctcttcagacacctcccgagtcaagtacagtagaccaggctaagagagttggaagaaatcagtctccgccagtgggttatatgtctcagcccaagtccttgcagcttttaaagccatccatattgagttctttggtaccgcctccagtttctgaatcatctccaagtaggactcccacttgtaaaaagtcaccaataatcacaacatgtaattcagcaaaacttcagccaacatctagtcaaacaaatcttgcaaataatcagaatctgaaagcatctaagctccgccccccctcaggctctttcaaacaaaaacaaacaaacagcccccaactagagcctcaaagcttccaggccaagacaagcatcccaaggccactaacacaacgaaaagaaatcatgcagaatccaaatggcaatttgcattctggggattgtttggcctctaatcgatattctcgtcttcctaaaccaaagatacattaagtacatagccatcacctgccaatttgtttcttaaaaacaatctcttctgtaatagctttatgtgcagcttgcagcttgctactgtggtggaggttccattgaaagcctgcaaatcttaaattaaaatgtggaagcttctactagtttggctccttcattttatatcctggttgaagtacatgccatttgagcataattat

SEQ ID NO: 1816 - protein, 235 aa, Homo sapiens [sequence omitted]

SEQ ID NO: 1817 - DNA, 1920 bp, Homo sapiens
  source (1)..(1920)
  CDS (201)..(257)
  CDS (445)..(642)
  CDS (1523)..(1720)
gaatgctttgaagaaactcttcctaagctagtgtgagaggagaatccctcgtgtctgaacttgagtgggcgatgggaaaaaatatggtgggcagggagcgatgcatcttcttgcctctgaaaaatagaaagatctaaagatttgagcaagggaatcactgacattatttactgttccttggacttttgtatgttcctcaaatgagggaaccatgggccttcttcatccagatcaatgacctccaggagctgggggtggtaagtgtcagggcctagagacaagccctggttattaggccagtctctgcaagaaaggagcactggccctgccaagaacttcccctgggcttacctccagacaactgcattgcagttgccctccctgatggtcctgttgcaaatagtggctttgaaatagctgctgttgctctgtctgcccctctaggtgaattacaagaaaggctttgaacactcaaaggcgcagttccatctgccgttggacatggccgccctggtgcatgccaagaaggctcagaccctggccagcaatcaggactacaaacatccactgccccagtacacttccttggcagaagacctgaggctgagctgtgccaagaaagctcacaaattgcagagtgaggtaaggagacctggcctctttctcagggccccttcttctcttaggacctcagggtggtgacctccaggctcctgttggctcagtgaaatctctggaagtgagaaatcctaaacccaagtcttattttgaaacccagtctgagagttcctgcacatcccttaagcacagttacacaaatctaatcataaccacaatttattattttttgctgcactctaagcattgttttatgcattatctcacaatcagcccatatcattagtttattctcattttacagagaaattacagtgaaatgcagagaagttaaatatcttgtccaagatcacacagctatagttagaaagagagggctgggatttgaacttgaggtttgaatgacaaagatgccctcaaggttcatggttgtgcatgtttaagatttgccaatgatattgcctctggcctcaagtctcaggaaggattcctcttggtgcttcatgcgttcctgtgccacccgccttctgaggagggctaagatctgttgggagaggctgctcagaacctgtcaggactgacgcacttcagggagtggagagggaaatcagggccctggagaccctccttgggtccctttgaggagtctttgtactcctctgacatgcatttctcactcgtgatcccgatttctgaagcagacaggcccaggagggtcaggaagcattggagacttcctcactcccaaggagagccagagtgttcttcccaacaggcatccacatcctgttcactactcaccttatttcccagcttgctaggtttccatgctatgagatttgcaggtaatgggcccgcttaggaaaagaaaactccgcacaaaacctctttcctggtttggcagtgcctgcgatctgagcggcactcagatctgggtgtctgtcgtctgtttggattttacgcctgtgtacagcgtttactgaatgacataaactgtcaggaacctgagagcagctgtaggaacgagggagctgccacgctcatctcgggggcccgtttgtcacttgagcggagccctcacttgccctgcctctggttgtgatagcgattggaaggcaggacgcccagggggcgcctcactggctgaaggggagtgaatgtgggaactctttaaactgtcagcccgaatcattcaggtacacagactggcccccacccacacgaactcaggcaggcctttgccagattcttttggatttatttattagttctttcttaacccatgattaattaatgccaccc

SEQ ID NO: 1818 - protein, 150 aa, Homo sapiens
MREPWAFFIQINDLQELGVVNYKKGFEHSKAQFHLPLDMAALVHAKKAQTLASNQDYKHPLPQYTSLAEDLRLSCAKKAHKLQSECLRSERHSDLGVCRLFGFYACVQRLLNDINCQEPESSCRNEGAATLISGARLSLERSPHLPCLWL

SEQ ID NO: 1819 - DNA, 1633 bp, Homo sapiens
  source (1)..(1633)
  CDS (201)..(1433)
gtgtgccccttcccaaagagactccaaggaccccctgttcggggcccctcaaaccataaactccaggaatggtgggggacagtatctgggacttgctctctgggaccctggtggcctctctagtctggcctgtcagccaccagagggcgctaaaggaccatgggcagagtctgaggcagtggtggtaacgggtgaaggtgatggtggtggtggtgatgatggtggcagtagtggtggtggtggtgatgatgatattgatggtcatgatggtggtggtgacaatgatcatggggaccgtgctgatggcggtgtttgtgatgatggtggcggtggtggtgatggtggtgggcatgagggtagttggggtggtgatggcattaccgttgatgagggtggtgatgatagtgatggtgatggtggtgggaatgatgacgaagatgatgatgatagtggtgcaaatggcagtggtggtggtagtgactgtggtgttgttgatggtattagtgctgataaaggtggtgatgatgatgatggtggtgggtgacgaaggtggtggtggtgatgattgtggtggggataatggtggtgatggtggttattgcagtggtagtgttgatcatggtggtggtagtgatggtggtcatgatgttggtggtgttggtgttggtattggtgttggtgatggtgatggtggtggtaataatcatgggatgatgatagtagtcatggtggtagtgacaatggtgacagtggaggggatggtggtggtgataatgattgtggtggtgatggtgatagtgttggtactggtggtggtgatgatggttgtggtggtggtgatgatagtggaggtggtagtaatgatgatggtggtggtagctggtagtggtggcagtggtggtgatggtgatgattgtggtgatggtgatggggtagtggtggttatggtggtgttggttgttatggtggtagtgatgatcatggtggtggtgactatagtcactggtgatgctggtgttcatggtgatggtgatgatgatagtggtggtggttgtggcagtgctgctgctgatggtggtggtgatgatgagggtgatgatgacaatgagtatgatgatggtggtggtgatgatcgtggttgtggtgtgttgatggtggtgtttattgtggcggtgatgatgatagtgttaataattgtggtgatgttggtgatggtggtgatggagacgatgatggtgatgattgtactggtggtgttggtgatggtgtggtacgatggtggtgctgatggtcatgatggtggtgggggtgataatgatcctggtggtggccatggtggtgtttttgataacgtgataatgttggagatggtggtgattgtggtggtgataatggtggtcatggtgatggtgatatcagtgtgggtgatgtagtggtggggatggttcagatgttggtgatggtggtggtgatggcagtgatagttaggatgatggtgatgatgatgatggcatgggtgcttgatatggtttggctctgtgttcccttccaagttgtaatcaccataatccccatgtgtcaaaggcgggaccaggtggaggtaatcggatcatgggggtggtttcctccatgc

SEQ ID NO: 1820 - protein, 410 aa, Homo sapiens [sequence omitted]

SEQ ID NO: 1821 - DNA, 1423 bp, Homo sapiens
  source (1)..(1423)
  CDS (201)..(1223)
agctctttcaaagaaatgaaaacactcccgtgaaggtatgtgagactgcatcccttagtagatcttttgggattaagatcagaattatagtaaaaataggcaaagacttccttaagtatatgagactctatccaacagcagaaggttctgatcaagactggaagtgcaataaaagcaatgaagataagtatcagatatgaatgctcttctgcaatggtttgattgtaaatttattaatgatacaaagtattaaaaacttggattttttgtctctggagatggccaccgaattggacaaaatctttctgattctggcaatagcagaattcatcatcagcatgctggggaatgtgttcattggactggtaaactgctctgaagggatcaagaaccaaaaggtcttctcagctgacttcatcctcacctgcttggctatctccacaattggacaactgttggtgatactgtttgattcatttctagtgggacttgcttcacatttatataccacatatagactaggaaaaactgttattatgctttggcacatgactaatcacttgacaacctggcttgccacctgcctaagcattttctatttctttaagatagcccacttcccccactcccttttcctctggctgaggtggaggatgaacggaatgattgttatgcttcttatattgtctttgttcttactgatttttgacagtttagtgctagaaatatttattgatatctcactcaatataatagataaaagtaatctgactttatatttagatgaaagtaaaactctctatgataaactctctattttaaaaactcttctcagcttaaccagttttatccccttttctctgttcctgacctccttgctttttttatttctgtccttggtgagacatactagaaatttgaagctcagttccttgggctctagagactccagcacagaggcccataggagggccatgaaaatggtgatgtctttccttttcctcttcatagttcattttttttccttacaagtggccaatgggatattttttatgttgtggaacaacaagtacataaagtttgtcatgttagccttaaatgcctttccctcgtgccactcatttattctcattctgggaaacagcaagctgcgacagacagctgtgaggctactgtggcatcttaggaactatacaaaaacaccaaatgctttacctttgtagacagactttccagaagcttttctaagagaataactcaacgaggtgcatttggggatcacgtccactgtttttttttttttttttctactgggtttctctaagtattttggaacataaatgaaatcctaccaggttgcttttgatggtaattcacacattgccggtcgataccattttaaaagtaatcatttttgtttgga

SEQ ID NO: 1822 - protein, 340 aa, Homo sapiens [sequence omitted]

SEQ ID NO: 1823 - DNA, 1300 bp, Homo sapiens
  source (1)..(1300)
  CDS (201)..(1100)
taaagagagcattgaacttatccattagcatgccatggtgatttctgacttgacactggtcacagcaattaaaagtaaaaagaatgtcacagcacatacacaaatcaggtgcatatagaatttaaggtcaggatattcaagcaatcacaaccagtgatattacaccagcattttaaaaatttctttttgtctgttcagacatgataacttttctgcccatcattttttccattctaatagtggttatatttgtgattggaaattttgctaatggcttcatagcattggtaaattccattgagtgggtcaagagacaaaagatctcctttgttgaccaaattctcactgctctggcggtctccagagttggtttgctctgggtgttattactacattggtatgcaactcagttgaatccagctttttatagtgtagaagtaagaactactgcttataatatctgggcagtaaccggccatttcagcaactggcctgctactagcctcagcatattttatttgctcaagattgccaatttctccaaccttatttttcttcgcttaaagaggagagttaagagtgtcattctggtggtgctgttggggcctttgctatttttggcttgtcatctttttgtggtaaacatgaatcagattgtatggacaaaagaatatgaaggaaacatgacttggaagatcaaattgaggcgtgcaatgtacctttcagatacgactgtaaccatgctagcaaacttagtaccctttactgtaaccctgatatcttttctgctgttagtctgttctctgtgtaaacatctcaagaagatgcagctccatggcaaaggatctcaagatcccagtaccaaggtccacataaaagttttgcaaactgtgatctccttcttcttgttatgtgccatttactttgtgtctgtaataatatcagtttggagttttaagaatctggaaaacaaacctgtcttcatgttctgccaagctattggattcagctgttcttcagcccacccgttcatcctgatttggggaaacaagaagctaaagcagacttatctttcagttttgtggcaaatgaggtactgagtgaaaggagagaagccttcatctccatagattcagaagaggggcattgtgtgtcttctagcagaaaacaaactggtggtgtatgaaacattttatatttcttacagtgttttctgtaatgtatgtgtatgaataatttccaaacatatacctagataaatctttaacctagtctaaaaaatgtatgtatgtgtgtgtgt

SEQ ID NO: 1824 - protein, 299 aa, Homo sapiens
MITFLPIIFSILIVVIFVIGNFANGFIALVNSIEWVKRQKISFVDQILTALAVSRVGLLWVLLLHWYATQLNPAFYSVEVRTTAYNIWAVTGHFSNWPATSLSIFYLLKIANFSNLIFLRLKRRVKSVILVVLLGPLLFLACHLFVVNMNQIVWTKEYEGNMTWKIKLRRAMYLSDTTVTMLANLVPFTVTLISFLLLVCSLCKHLKKMQLHGKGSQDPSTKVHIKVLQTVISFFLLCAIYFVSVIISVWSFKNLENKPVFMFCQAIGFSCSSAHPFILIWGNKKLKQTYLSVLWQMRY

SEQ ID NO: 1825 - DNA, 1360 bp, Homo sapiens
  source (1)..(1360)
  CDS (201)..(1160)
taaagagagcattgaacttatccattagcatgccatggtgatttctgacttgacactggtcacagcaattaaaagtaaaaagaatgtcacagcacatacacaaatcaggtgcatatagaatttaaggtcaggatattcaagcaatcacaaccagtgatattacaccagcattttaaaaatttctttttgtctgttcagacatgataacttttctgcccatcattttttccattctaatagtggttatatttgttattggaaattttgctaatggcttcatagcattggtaaattccattgagtgggtcaagagacaaaagatctcctttgttgaccaaattctcactgctctggcggtctccagagttggtttgctctgggtgttattactacattggtatgcaactcagttgaatccagctttttatagtgtagaagtaagaattactgcttataatgtctgggcagtaaccaaccatttcagcagctggcttgctactagcctcagcatgttttatttgctcaggattgccaatttctccaaccttatttttcttcgcataaagaggagagttaagagtgttgttctggtgatactgttggggcctttgctatttttggtttgtcatctttttgtgataaacatggatgagactgtatggacaaaagaatatgaaggaaacgtgacttggaagatcaaattgaggagtgcaatgtaccattcaaatatgactctaaccatgctagcaaactttgtacccctcactctgaccctgatatcttttctgctgttaatctgttctctgtgtaaacatctcaagaagatgcagctccatggcaaaggatctcaagatcccagcaccaaggtccacataaaagctttgcaaactgtgacctcctttcttctgttatgtgccatttactttctgtccatgatcatatcagtttgtaattttgggaggctggaaaagcaacctgtcttcatgttctgccaagctattatattcagctatccttcaacccacccattcatcctgattttgggaaacaagaagctaaagcagatttttctttcagttttgcggcatgtgaggtactgggtgaaagacagaagccttcgtctccatagattcacaagaggggcattgtgtgtcttctagcagaaaacaaactggtggtgtatgaaacattttatatttcttactgggttttctgtaatatatgtatatgaataatttccacatgtatacctagaaaagtcttttacctaaagttagtctagaaaagtacatatatatagatgtgtgtgtgtgtgtgtgtgtgtatgaaaaactgaagaacattgacaataacatgcttt

SEQ ID NO: 1826 - protein, 319 aa, Homo sapiens
MITFLPIIFSILIVVIFVIGNFANGFIALVNSIEWVKRQKISFVDQILTALAVSRVGLLWVLLLHWYATQLNPAFYSVEVRITAYNVWAVTNHFSSWLATSLSMFYLLRIANFSNLIFLRIKRRVKSVVLVILLGPLLFLVCHLFVINMDETVWTKEYEGNVTWKIKLRSAMYHSNMTLTMLANFVPLTLTLISFLLLICSLCKHLKKMQLHGKGSQDPSTKVHIKALQTVTSFLLLCAIYFLSMIISVCNFGRLEKQPVFMFCQAIIFSYPSTHPFILILGNKKLKQIFLSVLRHVRYWVKDRSLRLHRFTRGALCVF

SEQ ID NO: 1827 - DNA, 1330 bp, Homo sapiens
  source (1)..(1330)
  CDS (201)..(1130)
cccataaaggcagcattgaactcattcattagtttaagctggtgcttttctgttgacattgttcacagaatttaaaagtataaagaatgttattggacattcaggaatcaagtgcatatttaacttaaagtcttgaatatcagaggagtcaccatcagtgacattaggcctgaattttttacttgcttttttgtttagacatgatgagttttctacacattgttttttccattctagtagtggttgcatttattcttggaaattttgccaatggctttatagcactgataaatttcattgcctgggtcaagagacaaaagatctcctcagctgatcaaattattgctgctctggcagtctccagagttggtttgctctgggtaatattattacattggtattcaactgtgttgaatccaacttcatctaatttaaaagtaataatttttatttctaatgcctgggcagtaaccaatcatttcagcatctggcttgctactagcctcagcatattttatttgctcaagatcgtcaatttctccagacttatttttcatcacttaaaaaggaaggctaagagtgtagttctggtgatagtgttggggtctttgttctttttggtttgtcaccttgtgatgaaacacacgtatataaatgtgtggacagaagaatgtgaaggaaacgtaacttggaagatcaaactgaggaatgcaatgcacctttccaacttgactgtagccatgctagcaaacttgataccattcactctgaccctgatatcttttctgctgttaatctactctctgtgtaaacatctgaagaagatgcagctccatggcaaaggatctcaagatcccagcaccaagatccacataaaagctctgcaaactgtgacctccttcctcatattacttgccatttactttctgtgtctaatcatatcgttttggaattttaagatgcgaccaaaagaaattgtcttaatgctttgccaagcttttggaatcatatatccatcattccactcattcattctgatttgggggaacaagacgctaaagcagacctttctttcagttttgtggcaggtgacttgctgggcaaaaggacagaaccagtcaactccatagattcacaagaggtgcattgtgtgttttctagcagaaaacaaattgatggtgtctggaacattttatatttcccacaagtttttccgtagtctatgtatttgagtaatttccaaaagttgacatagaaaagtcttttacctaagtttattatataaaagtatatatatataatatacatttgcgtgtgtgtgtatgtctga

SEQ ID NO: 1828 - protein, 309 aa, Homo sapiens
MMSFLHIVFSILVVVAFILGNFANGFIALINFIAWVKRQKISSADQIIAALAVSRVGLLWVILLHWYSTVLNPTSSNLKVIIFISNAWAVTNHFSIWLATSLSIFYLLKIVNFSRLIFHHLKRKAKSVVLVIVLGSLFFLVCHLVMKHTYINVWTEECEGNVTWKIKLRNAMHLSNLTVAMLANLIPFTLTLISFLLLIYSLCKHLKKMQLHGKGSQDPSTKIHIKALQTVTSFLILLAIYFLCLIISFWNFKMRPKEIVLMLCQAFGIIYPSFHSFILIWGNKTLKQTFLSVLWQVTCWAKGQNQSTP

SEQ ID NO: 1829 - DNA, 1357 bp, Homo sapiens
  source (1)..(1357)
  CDS (201)..(1157)
gcaaggagagaatgtatatgaagaggagtgaatttgagctgttttgagaataatgaccttttctatttctataaagacagttttgaattcatctattagcatatgctggtgcttgcctgttgacactagtcactgaatttaaaggcagaaaatgttattgcacatttagtaatcaagtgttcatcgaagttaacatctggatgttaaaggactcagaacaagtgttactaagcctgcatttttttatctgttcaaacatgatgtgttttctgctcatcatttcatcaattctggtagtgtttgcatttgttcttggaaatgttgccaatggcttcatagccctagtaaatgtcattgactgggttaacacacgaaagatctcctcagctgagcaaattctcactgctctggtggtctccagaattggtttactctgggtcatgttattcctttggtatgcaactgtgtttaattctgctttatatggtttagaagtaagaattgttgcttctaatgcctgggctgtaacgaaccatttcagcatgtggcttgctgctagcctcagcatattttgtttgctcaagattgccaatttctccaaccttatttctctccacctaaagaagagaattaagagtgttgttctggtgatactgttggggcccttggtatttctgatttgtaatcttgctgtgataaccatggatgagagagtgtggacaaaagaatatgaaggaaatgtgacttggaagatcaaattgaggaatgcaatacacctttcaagcttgactgtaactactctagcaaacctcataccctttactctgagcctaatatgttttctgctgttaatctgttctctttgtaaacatctcaagaagatgcggctccatagcaaaggatctcaagatcccagcaccaaggtccatataaaagctttgcaaactgtgacctccttcctcatgttatttgccatttactttctgtgtataatcacatcaacttggaatcttaggacacagcagagcaaacttgtactcctgctttgccaaactgttgcaatcatgtatccttcattccactcattcatcctgattatgggaagtaggaagctaaaacagacctttctttcagttttgtggcagatgacacgctgagtgaaagaagagaaaccctcaactccatagattcacaaggggagcatcgtgggtcttctagcagaaaacaaactgatggtgtctggaacattttatatttctatcagtttttccatagtgtttgtatgtgagtaatttcaaaacagatacctagaaaagtcatatatatatttatgggtgtatatgtgtgcatgtgtgtg

SEQ ID NO: 1830 - protein, 318 aa, Homo sapiens
MLKDSEQVLLSLHFFICSNMMCFLLIISSILVVFAFVLGNVANGFIALVNVIDWVNTRKISSAEQILTALVVSRIGLLWVMLFLWYATVFNSALYGLEVRIVASNAWAVTNHFSMWLAASLSIFCLLKIANFSNLISLHLKKRIKSVVLVILLGPLVFLICNLAVITMDERVWTKEYEGNVTWKIKLRNAIHLSSLTVTTLANLIPFTLSLICFLLLICSLCKHLKKMRLHSKGSQDPSTKVHIKALQTVTSFLMLFAIYFLCIITSTWNLRTQQSKLVLLLCQTVAIMYPSFHSFILIMGSRKLKQTFLSVLWQMTR

SEQ ID NO: 1831 - DNA, 1300 bp, Homo sapiens
  source (1)..(1300)
  CDS (201)..(1100)
tccgtaaagatgacatcaaactcatccattagcataagctggtactttcttgtttgacactggtcacagtgtttaaaagtaaaaagaatgttactgcacattcagaaatcagatgcacataaaatttaaggtcagagtattaaagaaatcacaaccagtgatattaggcttgcattttctttctttttttctgctcagatatgataacttttctatacatttttttttcaattctaataatggttttatttgttctcggaaactttgccaatggcttcatagcactggtaaatttcattgactgggtgaagagaaaaaagatctcctcagctgaccaaattctcactgctctggcggtctccagaattggtttgctctgggcattattattaaattggtatttaactgtgttgaatccagctttttatagtgtagaattaagaattacttcttataatgcctgggttgtaaccaaccatttcagcatgtggcttgctgctaacctcagcatattttatttgctcaagattgccaatttctccaaccttctttttcttcatttaaagaggagagttaggagtgtcattctggtgatactgttggggactttgatatttttggtttgtcatcttcttgtggcaaacatggatgagagtatgtgggcagaagaatatgaaggaaacatgactgggaagatgaaattgaggaatacagtacatctttcatatttgactgtaactaccctatggagcttcataccctttactctgtccctgatatcttttctgatgctaatctgttctctgtgtaaacatctcaagaagatgcagctccatggagaaggatcgcaagatctcagcaccaaggtccacataaaagctttgcaaactctgatctccttcctcttgttatgtgccattttctttctattcctaatcgtttcggtttggagtcctaggaggctgcggaatgacccggttgtcatggttagcaaggctgttggaaacatatatcttgcattcgactcattcatcctaatttggagaaccaagaagctaaaacacacctttcttttgattttgtgtcagattaggtgctgagtaaaagacctgaaactctcaactctctagattcacaagtgggacattgtgtgtgtattctaggagaaaacaaactgatagtgtctggaacattttatactttttactgttttttctgtagtgtatgtttttgagtattttctgaaagcatacctagaaaagtcttttacctaaagttagtctaaaagtgtatctatgtg

SEQ ID NO: 1832 - protein, 299 aa, Homo sapiens
MITFLYIFFSILIMVLFVLGNFANGFIALVNFIDWVKRKKISSADQILTALAVSRIGLLWALLLNWYLTVLNPAFYSVELRITSYNAWVVTNHFSMWLAANLSIFYLLKIANFSNLLFLHLKRRVRSVILVILLGTLIFLVCHLLVANMDESMWAEEYEGNMTGKMKLRNTVHLSYLTVTTLWSFIPFTLSLISFLMLICSLCKHLKKMQLHGEGSQDLSTKVHIKALQTLISFLLLCAIFFLFLIVSVWSPRRLRNDPVVMVSKAVGNIYLAFDSFILIWRTKKLKHTFLLILCQIRC

SEQ ID NO: 1833 - DNA, 1171 bp, Homo sapiens
  source (1)..(1171)
  CDS (201)..(971)
tccataaatacattattgaactatcaattagcataaactgctactttcttgtttgacactggtcacagtatttgaaagtaaaaagaatgttactgcacattcagaaatcaggtccacataaaatttaaggtcaggatattaaaggatcacagccagtgctgttaggccttcatttattctatctttttgtctgttcagacatgataacttttctacccatcattttttccattctagtagtggttacatttgttcttgggaattttgctaatggcttcatagtgttggtaaattccattgagtgggtcaagagacaaaagatctcctttgctgaccaaattctcactgctctggcagtctccagagttggtttgctctgggtaatattattacattggtatgcaactgttttgaatccaggttcatatagtttaggagtaagaattactactattaatgcctgggctgtaaccaaccatttcagcatctgggttgctactagcctcagcatattttatttcctcaagattgccaatttctccaactttatttttcttcacttaaaaaggagaattaagagtgtcattccagtgatactattggggtctttgttatttttggtttgtcatcttgttgtggtaaacatggatgagagtatgtggacaaaagaatatgaaggaaacgtgagttgggagatcaaattgagtgatccgacgcacctttcagatatgactgtaaccacgcttgcaaacttaataccctttactctgtccctgttatcttttctgctcttaatctgttctttgtgtaaacatctcaagaagatgcagttccatggcaaaggatctccagattccaacaccaaggtccacataaaagctttgcaaacggtgacctccttcctcttgttatttgctgtttactttctgtccctaatcacatcgatttggaattttaggaggaggctgtagaacgaacctgtcctcatgctcagccaaactactgcaattatatacccttcatttcattcattcatcctaatttggggaagcaagaagctgaaacagacctttcttttgattttgtgtcagattaagtgctgagtaaaagacctgaaactctcaaatttctagattcacaagtgggacatcgtgtgtctccaagagaaaac

SEQ ID NO: 1834 - protein, 256 aa, Homo sapiens [sequence omitted]

SEQ ID NO: 1835 - DNA, 1330 bp, Homo sapiens
  source (1)..(1330)
  CDS (201)..(1130)
  modified_base (17)..(116): a, t, c, g, unknown or other
aaccaaatcgggggggnnnnnnnnnnnnnnnnnnnnnnnnnnnnnnnnnnnnnnnnnnnnnnnnnnnnnnnnnnnnnnnnnnnnnnnnnnnnnnnnnnnnnnnnnnnnnnnnnnnncagcgagaccacgtacccacctgcaggaacccaattccggacacaacaccagcatttaaaaaaattttttttgtctgttcagacatgataacttttctacccatcattttttccagtctggtagtggttacatttgttattggaaattttgctaatggcttcatagcactggtaaattccattgagtggttcaagagacaaaagatctcctttgctgaccaaattctcactgctctggcggtctccagagttggtttgctctgggtattattattaaactggtattcaactgtgttgaatccagcttttaatagtgtagaagtaagaactactgcttataatatctgggcagtgatcaaccatttcagcaactggcttgctactaccctcagcatattttatttgctcaagattgccaatttctccaactttatttttcttcacttaaagaggagagttaagagtgtcattctggtgatgttgttggggcctttgctatttttggcttgtcatctttttgtgataaacatgaatgagattgtgcggacaaaagaatttgaaggaaacatgacttggaagatcaaattgaagagtgcaatgtacttttcaaatatgactgtaaccatggtagcaaacttagtacccttcactctgaccctactatcttttatgctgttaatctgttctttgtgtaaacatctcaagaagatgcagctccatggtaaaggatctcaagatcccagcaccaaggtccacataaaagctttgcaaactgtgatctccttcctcttgttatgtgccatttactttctgtccataatgatatcagtttggagttttggaagtctggaaaacaaacctgtcttcatgttctgcaaagctattagattcagctatccttcaatccacccattcatcctgatttggggaaacaagaagctaaagcagacttttctttcagttttttggcaaatgaggtactgggtgaaaggagagaagacttcatctccatagattcacgagaggggcattgtgtatcttctagcaggaaacaaactggtggtgtatgaaacattttatatttcttactggtttttctatactgtatgtgtatgaataatttccaaacgtatacctagaaaagtctttgacccaatggcagtctagaaaatatatatatatatatatatatatatatgtgtgtgtgtgtgtgt

SEQ ID NO: 1836 - protein, 309 aa, Homo sapiens
MITFLPIIFSSLVVVTFVIGNFANGFIALVNSIEWFKRQKISFADQILTALAVSRVGLLWVLLLNWYSTVLNPAFNSVEVRTTAYNIWAVINHFSNWLATTLSIFYLLKIANFSNFIFLHLKRRVKSVILVMLLGPLLFLACHLFVINMNEIVRTKEFEGNMTWKIKLKSAMYFSNMTVTMVANLVPFTLTLLSFMLLICSLCKHLKKMQLHGKGSQDPSTKVHIKALQTVISFLLLCAIYFLSIMISVWSFGSLENKPVFMFCKAIRFSYPSIHPFILIWGNKKLKQTFLSVFWQMRYWVKGEKTSSP

SEQ ID NO: 1837 - DNA, 1330 bp, Homo sapiens
  source (1)..(1330)
  CDS (201)..(1130)
gaagctttgtcctttctctcttctcaataaaccttgctgttgctcactctttgggtccatgccatctttaagagcagcaacactcaccgtgaaggtcggtggctccatttttgaagtcagggagaccacgaacccacctgcaggaaccaactccggacacaacaccagcattaaaacaatttttttttgtctgttcagacatgacaacttttatacccatcattttttccagtgtggtagtggttctatttgttattggaaattttgctaatggcttcatagcattggtaaattccattgagcgggtcaagagacaaaagatctcttttgctgaccagattctcactgctctggcggtctccagagttggtttgctctgggtattattattaaattggtattcaactgtgtttaatccagctttttatagtgtagaagtaagaactactgcttataatgtctgggcagtaaccggccatttcagcaactggcttgctactagcctcagcatattttatttgctcaagattgccaatttctccaaccttatttttcttcacttaaagaggagagttaagagtgtcattctggtgatgctgttggggcctttactatttttggcttgtcaactttttgtgataaacatgaaagagattgtacggacaaaagaatatgaaggaaacttgacttggaagatcaaattgaggagtgcagtgtacctttcagatgcgactgtaaccacgctaggaaacttagtgcccttcactctgaccctgctatgttttttgctgttaatctgttctctgtgtaaacatctcaagaagatgcagctccatggtaaaggatctcaagatcccagcaccaaggtccacataaaagctttgcaaactgtgatctttttcctcttgttatgtgccgtttactttctgtccataatgatatcagtttggagttttgggagtctggaaaacaaacctgtcttcatgttctgcaaagctattagattcagctatccttcaatccacccattcatcctgatttggggaaacaagaagctaaagcagacttttctttcagttttgcggcaagtgaggtactgggtgaaaggagagaagccttcatctccatagattcatgagaggggcattgtgtgtcttctagcagaaaacaaactggtggtgtatgaaacattttatatttcttactggtttttctatactgtatgtgtatgaataatttcccaacgtatacctagaaaagcctttgacctaatattagtctagaaaaaaaaatatatatatgtgtgtgtttatgtgtgtatgaaaactta

SEQ ID NO: 1838 - protein, 309 aa, Homo sapiens
MTTFIPIIFSSVVVVLFVIGNFANGFIALVNSIERVKRQKISFADQILTALAVSRVGLLWVLLLNWYSTVFNPAFYSVEVRTTAYNVWAVTGHFSNWLATSLSIFYLLKIANFSNLIFLHLKRRVKSVILVMLLGPLLFLACQLFVINMKEIVRTKEYEGNLTWKIKLRSAVYLSDATVTTLGNLVPFTLTLLCFLLLICSLCKHLKKMQLHGKGSQDPSTKVHIKALQTVIFFLLLCAVYFLSIMISVWSFGSLENKPVFMFCKAIRFSYPSIHPFILIWGNKKLKQTFLSVLRQVRYWVKGEKPSSP

SEQ ID NO: 1839 - DNA, 1648 bp, Homo sapiens
  source (1)..(1648)
  CDS (201)..(1448)
  modified_base (212)..(311): a, t, c, g, unknown or other
tctgtaacaacaactacggtctttttcagctcacttttgttctacctatgattccttagtatgcttagagtcctaggaactgccattttgtctgattgtatttctacaagtcactagcaatagttctctttcctcctctcctctacactctagttgaatgccttgttgtaagtagataagagaatataattttttataggatggtatttgannnnnnnnnnnnnnnnnnnnnnnnnnnnnnnnnnnnnnnnnnnnnnnnnnnnnnnnnnnnnnnnnnnnnnnnnnnnnnnnnnnnnnnnnnnnnnnnnnnngggggggaagggaaaaggaaaaggggggagggggggaagggaaaaggggaaaaaagagggaaagaagaaaaaaaagggaaaagaaaaagggggggaagggaaaagggaagaaagagggaaaaggggagaaaggaagaagagaagggaaaggagggaggagggggagggaaggagaggggagaagaaaggaggagagggaaaagggagaaaaaaaaaagaaaaagaggagaggagaaaaaagggaaaaaaggggagaaggaagggaaaagggaaaaaaaaaaggggggggaagaaaaaggaaggaaaaaaaaaagaaaaaaaggggaaggagggaggggaaggaaaaagagggggaaaaaaaggaagaggggagggaaagaaaaaaggggagggggggggaaaaggggaagaggggaagaaggaggaaaaggggggagaggggaagggaaggaagggaaaaggggaggaaaaaaaaaaaagagaaaaagaaagggaaagagaaggaaaggagggagggagggggcctcctcccctcccctccccttccctccccacccacctctgctgccctcctctcccctccgctcccctccgctcccctccgctcccctccgctcggctcctctcctctccgctcctctcttctctcctccttctcttctcttttctcttctcttctcttctcttctcttctcttctcttctcttctcttctctcctctcctctcttctcttcctttctttctttctttctttcctttctttctttcttttgtccttccttccttccttccttccttccttcctttctctctctctctccctctctctctttctttctttctttctttctttctttctttctttctttctttctttcatctgtctgtctgtctttctttctttctgtctttttttaatggagtcttgctctgtcacccaggctggagtgcagtcgtgtgatctcggctcactgcaacttctgcctgctgagttcaagcaattctcctgcctcagcctcccaagtagctgggattgcaggtgggtaccaccacgcctggctaatttttgtctttgtagtagagatggggcttcaccatgttggccaggttggtcccaaactcatgacctctggtgatccaccagcctcggcctccgaaagtgctggaattacaggcatgagccactacgcccagccagcaatagttctttttctaatcctttgaatgaatcaatcaaaataaagtcaacaagacacttgaattactaatgttcaaagtataaacatatattatctactttaggcaacctgaatgaataatcattttcagcacccta

SEQ ID NO: 1840 - protein, 415 aa, Homo sapiens
  MOD_RES (4)..(37): Variable amino acid
MVFXXXXXXXXXXXXXXXXXXXXXXXXXXXXXXXXXXGGEGKRKRGEGGKGKGEKRGKEEKKGKRKRGGREKGRKREKGRKEEEKGKEGGGGGKERGEERRRGKREKKKRKRGEEKKGKKGEKEGKREKKKGGEEKGRKKKRKKGEGGRGRKKRGKKRKRGGKEKRGGGGKRGRGEEGGKGGRGEGKEGKRGGKKKKRKRKGKRRKGGREGASSPPLPFPPHPPLLPSSPLRSPPLPSAPLRSAPLLSAPLFSPPSLLFSLLFSSLLFSSLLFSSLLSSLLFLSFFLSFLSFFLLSFLPSFLPSFLSLSLSLSLFLSFFLSFFLSFFLSFICLSVFLSFCLFLMESCSVTQAGVQSCDLGSLQLLPAEFKQFSCLSLPSSWDCRWVPPRLANFCLCSRDGASPCWPGWSQTHDLW

SEQ ID NO: 1841 - DNA, 874 bp, Homo sapiens
  source (1)..(874)
  CDS (201)..(674)
gtatagttttaaaactcagaatgctcttttacccctattcaggtttttactaaattctataaaacacaagagagggagccatggaatgacaaataggccctatcatgaggcaccaaactgctgaatcacataggcagtagagagctaattcattatctcagttagcataagggtttttatttttaaccaagggaaaaaaaatgaacaagctcacaaaaaaaccttcagaaaccctgaactactgcgtctcgtataaaaagaacaagtcattttgttttcatgaagcacctggaatatatgctcagagaagatcatggtgccaaagatatagagacaatgttttcaaagggtgggaagggcacgtgagagggaaaaaagagaaaggggaaggaggaaaggagggaaggaaggaaagaaggaaggaaggaaggaaggaaggaaaaggaatggaaggaaggaagggaaagaaggaaagaaaccccgaaagaaagagaaagactattcccttgagaaagaagataaacagaggaataccctggggcggcctcctcctcctagggatcaataggtcttcatctttgtctttcagaagctgctgtagaagagaaaaatatttctttcaaaaaataaatcacaaatactataaacatataaacctacatatgtactcataaaaattaagaataaatataaataaaaaccaaaaattaatacatcttttttattaacaaaaaaatctctagcaattgcttgtgaaatggtatctttaatgagtgaggtaattttgacagatagacatagtattctgcagaaactgaaaatattatatttcatgcaaatcaaaaccacaatgagataccatctcacactactc

SEQ ID NO: 1842 - protein, 157 aa, Homo sapiens [sequence omitted]

SEQ ID NO: 1843 - DNA, 973 bp, Homo sapiens
  source (1)..(973)
  CDS (201)..(773)
taatcccagcactatgaggggactgaggcgggcagattacgtgaggtcaggagtttgagaccagcctggccaacatggcgaaacctcatctctactaaaaatacacaaattagctgggcgtggtggcaggtgcctgtaatcctagctattcaggaggctacggcaggagaattgcttgaatctggaaggcagacgttgcaatgagtcgagattgtgctactgcaccaccccagcctgggcaacagagcaagactctgtcaaaaaaaaaaaaaaaaaaaaaaaagaaagaacgacggaaggaaggaaagagagagagaaagaaagacagaaagacagacagacagaaagaaagaaagaaacacagaaacaaagaaagaaacaaagaaagagagaaaaagtgcatgtcccatataatccagcaacttcccttttgggttcctccccagagcagtcattctcaaccagggttgactttgccctccccgcccccaccatggatatatctggagacatttttgatggtcgtgatgtgtgtgcacaggtactcctggctttgggtgggtagaggccagggatgctgctcaacatcctacaatgcacaggacaggcccccaccacaaagaattatctggccccaaatgtcaatagtgttgaggttcaaaaacctctcctacagaaataccagcacagatgcacaggaaagaatgaaaaagatgcccagagagcctttttttttttttttttccaatagcaaagacttggaaacagtttgaatatgcattaacaggggactggtaggggactggctaaatgaataagcattgaccctggctgcacattaaaatcactaggggattgtagcacactgatgcccaggccggagcctcggagttctgattcaactctgctagggacaggccttggcatccatattttataaaggactcctccctcccccacataaacacacacc

SEQ ID NO: 1844 - protein, 190 aa, Homo sapiens [sequence omitted]

SEQ ID NO: 1845 - DNA, 1132 bp, Homo sapiens
  source (1)..(1132)
  CDS (201)..(320)
  CDS (597)..(932)
atcagacccagagagtcctttaaaaaaataaaaagattctatcgcagtggaaactgaacaactttttttctaagacgaccacccctcgggaacaaaagttatatttcagtcacatgttgggtgtaggaatagggagcaggttttttttttttgttttttgttttttttttttttaagcgcactaattacgggggtgttttacggttctggagacaatccgggttgctctgaccaattgtgaccggcatttcattgtcaaaaagcaagggggtgggggccgaggagccggcaggggctcggcggtgggggggagtagcaaggttacgctaaagggtacagcagccaccgcgagctgcatctctttccctctcgccccaaataatttcctgcgaacagagcaactgcaacagcctgctctgaggagcccagcacgactgccctggccggtgcagctcagggtttccaccacgtagaaggaggggagaagatttttaccttaatgctacactgagcaggagtctcagacatgtctcacagcgagagagatcaggaagttctcaggttttttccactttcctttcctctccccaacccagaaaggctccacggccagccagacgcggtcatttaagaagtttcttccagcatctctcccggcagccgccccgggggtctggagcgcgcggggcggggcggggcggccggcggagttgggcgcgcggggcggcgggggcgtgggagacgggcccgagcgcggcggcggggtctgcaggtcgcggcgcggcgcggggacccgggacgcagcccggccggcctcccggtctctcctcccacccgcagccggcgcccccgccccccgccctcccgcggctctccctcgctctctcgaatgttttccttcctggaagagagaaactgaaaggcagaactgagaaagctctttgctcattgatcttgagagtttcagtgcagaaactgacgtgaattcccagcactgagctctgcctcttaaaggagccaccaggaaataaaagctcgggttacagcccggcatcggggaaataaaagctgcgcgggggaggggcggccgcgggggcgcgggcggaggaaacccgggtagcggggccgcgtg

SEQ ID NO: 1846 - protein, 151 aa, Homo sapiens
TVLETIRVALTNCDRHFIVKKQGGGGRGAGRGSAVGGSSKKGSTASQTRSFKKFLPASLPAAAPGVWSARGGAGRPAELGARGGGGVGDGPERGGGVCRSRRGAGTRDAARPASRSLLPPAAGAPAPRPPAALPRSLECFPSWKRETERQN

SEQ ID NO: 1847 - DNA, 862 bp, Homo sapiens
  source (1)..(862)
  CDS (201)..(662)
gttaccaatttacaggctctttaacttccaggtctaataatttgtttgattttagacatgattcatactacctacaaatattctctttatatagtacacttgtattaaaatgatttgacaacttctagaatttttcttaagggtgagatacaaaacattgaggtcagatttgattggctggcaacaataagaacattgtaatggtgtcatttgggataaacaacaaaaaacagtaccaacaaactttcgacaaagaagaaggagactttagaggacaaaatacatatttgttagtcactttccatgtgttatttaacttattcctcagaaaacccctacaaattaggtattcccattttacagatgaggaaagattaatcagtcagaccctgcaggaatggagcctcagtggcttttattattattgtatttatttatttatttatttatttattatttatttatttatttatttatttatttatttatttattttgagatggagtctcgctctgtctcccaggctagagtgcagtggcgcgatctcggctcactgcaacctccgcctcccggattcaagcgattctcctgcctcagactcccgcgtagctgggactacaggcgcccaccgccatgcccgactaatttttttgtgtttttagtagagacggggtttcgccacgttggccaaattggtctcgaactcctgacctgaggtgatccacctgtctcggcctcccaaagcgctgggattacagacgtgagtcaccacgcccggccggtttttctttctttccttcttttttgagacggagctcactccgtcgcccaagctggagtgaagtgttgcaatctcggctca

SEQ ID NO: 1848 - protein, 153 aa, Homo sapiens
MVSFGINNKKQYQQTFDKEEGDFRGQNTYLLVTFHVLFNLFLRKPLQIRYSHFTDEERLISQTLQEWSLSGFYYYCIYLFIYLFIIYLFIYLFIYLFILRWSLALSPRLECSGAISAHCNLRLPDSSDSPASDSRVAGTTGAHRHARLIFLCF

SEQ ID NO: 1849 - DNA, 871 bp, Homo sapiens
  source (1)..(871)
  CDS (201)..(671)
tttcatgtgccatgttccgcttggggtggttacgacagacaatattcagaaaatggaagaatcagaaagagaagaaagtggaacacacaagagaaagaaaaccaaggccctcctccctcctgccatggccctctctgtcttcagccctagttctggaaaagaaaagggtgtgttgtcactagaggcctccaggcaggtccatgccactgagtcacatttcaagctgtgtttgcttcctacaccaacaaggcatatcttttctgaattgtgcaatattctggccacctgggtttttctacttggtataccaactcctagtactcaacaaccattccctttactcttttttttttttttttttttttttttttgagacagagtctcactctgcacaatctcggctcactgcaacctccgcctcccaagttcaagcgattctccctgtctcagcctcccaagtagctgggactacaggtgcccaccgccatgcccagctaatttcttttttacttttagtagagacagggcttctccatgttggccaggctggtctcaaactcctgacctcaggtgatctgcctgcctcagcctcccaaagtgctgggattacaggtgtgagccactgcgcctggcccccctttactcttaaatacagtgtgtgccagctgtagtagtttatgcctgtactccgagcatctcaggaggctgaggcaggaggatcacttgagcccaagagctttaggctgtagtaagccaaggtcacaccactgcattctagcctgggcaacagagcaagaccctgactcttaaaaaaaaatacaatgtgtaatggtgatataataattcaaaggttaatcatctctacttttga

SEQ ID NO: 1850 - protein, 156 aa, Homo sapiens
MPLSHISSCVCFLHQQGISFLNCAIFWPPGFFYLVYQLLVLNNHSLYSFFFFFFFFFETESHSAQSRLTATSASQVQAILPVSASQVAGTTGAHRHAQLISFLLLVETGLLHVGQAGLKLLTSGDLPASASQSAGITGVSHCAWPPFTLKYSVCQL

SEQ ID NO: 1851 - DNA, 943 bp, Homo sapiens
  source (1)..(943)
  CDS (201)..(743)
tgatttagggtatctggaggaagaaatttctaagcagcaaagcattcaagaggtgacttgggtgctgtaaaaggcattcagttttataagagaagcagagcataaaagttcagaaaatttgtagcctgacaatgtgatagaaaagaaaatcccattttctgagaagaaattcaagccagctgcagagatttgcataagtaatgagaagccgaatgttaatccccaagacaatggggaaaatgtctccagggcatgtcagagatcttcacagcagctgttcccatcacagacccagaggcctaggaggaaaaactggtcttgtgggctgggcccagggtccacaggttgtatgcagcctagggacttggtgccctgcatcccggccactccagtcgtggctgaaagggcccaatgcagagctcaggttgcggcttcagagggtgccagccccaagccttggcagcttcctcatggtattgagcctgggagtgaacagaagtcaagaattggggtttgggaacctctgcctagatttcagaggatggagtatggaaacacctgtatgtccagggagaagtttgctgaagggacagggccctcatggaggacctctgctacggcagtgcagacaggaaatgtggggtcagagcccccacacagtctctactggggccctctctagtggagctgtgagaagagtgccaccatcctgcagaccccagaatggtagatccactgactgacatcttgcactgtgcacctggaaaagctgcagacactcaatgccagcctgtgaaagcagccaggaaggaggctgtaccttgcaaagccacaagggtagagctatgcaagaccaaaggaacccaccttttgtatcagcatgacctctatgtgagacatggagtcaaaggagatcattacagggcttttagatttgactgcc

SEQ ID NO: 1852 - protein, 180 aa, Homo sapiens
MRSRMLIPKTMGKMSPGHVRDLHSSCSHHRPRGLGGKTGLVGWAQGPQVVCSLGTWCPASRPLQSWLKGPNAELRLRLQRVPAPSLGSFLMVLSLGVNRSQELGFGNLCLDFRGWSMETPVCPGRSLLKGQGPHGGPLLRQCRQEMWGQSPHTVSTGALSSGAVRRVPPSCRPQNGRSTD

SEQ ID NO: 1853 - DNA, 862 bp, Homo sapiens
  source (1)..(862)
  CDS (201)..(662)
ccgcctcccaggttcacgccattctcctgcctcagcctcccgagtagctgggactacaggtgcccgccaccatgcccggctaattttttttttgtatttttagtagagacggggtttcaccttgttagccaggatggtctcgatctcctgacctcgtgatccgcccgcgtcggcctcccaaagtgcttgggattacaggcatgagccaccatgcccggcctttttttactatctctatagctttgtcttttacacaatgtcatataattggaattatacagtatgttgccttttccggctgccttctttcacctagcaatacatatctttttttttctttgagacacagtctcactttgttgcccaggttgaagtgcagtggcaccatctcacctcactgcaatatctcactcccgggttcaagtgattctcgtgcctcagcctcccaagtagctgggattacaggcgtgcaccgccaccccccgctaatttttgtatttttagtaaagatggggtttcaccatgttggccaagctggtctcaaactcctgacctcaagtgatctgcctgcctcggcctcccaaattgctgggattacaggcgtcagccaacctcctggcagcaatacacatttgaagaggttcatgtctctactaaaataattaactctactagttctgtctctactaaaataattaaaataatgcatgtctttttctggcttcacagctcatttctttctttctttctttcttttttttttgagatggagtcttgctctgctgcccaggctggagtgcagtggtgtgttctcggctcactgcaacctctgacccccgggttcaatcgattcttctgcctc

SEQ ID NO: 1854 - protein, 153 aa, Homo sapiens [sequence omitted]

SEQ ID NO: 1855 - DNA, 943 bp, Homo sapiens
  source (1)..(943)
  CDS (201)..(743)
ccctcccctcacttcccagcgcctcgggccatcctgcttctccaggcctgagaggaactttctggaagtgctgcgtatcttcaagaggccggccagaagtgaaagccgcggcaggcctgagcgccggccccaggggaggggtccctcgggccctcgtcgtcccggggccgcttccccgactgtaaataagtgtctttaggatgaaacgccacgcgatagtgtcctcggaaccttcgcacgagatccagcacacaacatccgaccacacactggggcggccagcctcccgcgttcgcccgcctctgctcttggttgcttcgggcgcgcatttcggtccacggatgacctttaacaggtctcctgcagtggaaccaggggtgagggcctcgtccaagggcgtgaggggcgcgtggaaatggaacaacctcccaggctcgcatcctcctcggggacctcccagaaggctcaaccggaagaaaacccgcgacccgcgcgaggacagcgaaagcgcaaacgccggccgccaggagtcgcagcgcgcctgcgtccagttcacgctccggctcccaggcgcgccccgccccccggcccggaagtgcgcaggcgctggcaagatggcgggaggggtgctcccgctgaggggcctccgcgccttgtgtcgcgtgctgctcttcctctcgcagttctgcattctgtcgggcggtggtgagtcaaaggctgggttcagcgccgggtggggctgagtggcagcagggccccgggagctgcgaggaggccgggcccacgggcggacgctgacgcggggaggaggccgagtgccgggctccgggccgcttgtcgctgcatctggagtctggcgccctggccgcccggcccgaggccgcccctccgctccggcgacaccgagcccgccatcgcggctgcggagccctggcacggagat

SEQ ID NO: 1856 - protein, 180 aa, Homo sapiens
MKRHAIVSSEPSHEIQHTTSDHTLGRPASRVRPPLLLVASGAHFGPRMTFNRSPAVEPGVRASSKGVRGAWKWNNLPGSHPPRGPPRRLNRKKTRDPREDSESANAGRQESQRACVQFTLRLPGAPRPPARKCAGAGKMAGGVLPLRGLRALCRVLLFLSQFCILSGGGESKAGFSAGWG

SEQ ID NO: 1857 - DNA, 3163 bp, Homo sapiens
  source (1)..(3163)
  CDS (201)..(2963)
  modified_base (556)..(655): a, t, c, g, unknown or other
  modified_base (658)..(669): a, t, c, g, unknown or other
  modified_base (671)..697): a, t, c, g, unknown or other
  modified_base (704)..(707): a, t, c, g, unknown or other
  modified_base (709)..(736): a, t, c, g, unknown or other
  modified_base (739)..(743): a, t, c, g, unknown or other
  modified_base (745)..(747): a, t, c, g, unknown or other
  modified_base (750): a, t, c, g, unknown or other
  modified_base (752): a, t, c, g, unknown or other
  modified_base (754)..(756): a, t, c, g, unknown or other
  modified_base (761): a, t, c, g, unknown or other
  modified_base (763): a, t, c, g, unknown or other
  modified_base (818): a, t, c, g, unknown or other
  modified_base (843): a, t, c, g, unknown or other
  modified_base (892): a, t, c, g, unknown or other
  modified_base (897): a, t, c, g, unknown or other
  modified_base (920): a, t, c, g, unknown or other
  modified_base (941): a, t, c, g, unknown or other
  modified_base (993): a, t, c, g, unknown or other
  modified_base (995): a, t, c, g, unknown or other
  modified_base (1066)..(1067): a, t, c, g, unknown or other
  modified_base (1082)..(1084): a, t, c, g, unknown or other
  modified_base (1105)..(1107): a, t, c, g, unknown or other
  modified_base (1130): a, t, c, g, unknown or other
  modified_base (1147): a, t, c, g, unknown or other
  modified_base (1162): a, t, c, g, unknown or other
  modified_base (1202): a, t, c, g, unknown or other
  modified_base (1233): a, t, c, g, unknown or other
  modified_base (1247)..(1248): a, t, c, g, unknown or other
  modified_base (1261): a, t, c, g, unknown or other
  modified_base (1485): a, t, c, g, unknown or other
  modified_base (1500): a, t, c, g, unknown or other
  modified_base (1544): a, t, c, g, unknown or other
  modified_base (1601): a, t, c, g, unknown or other
  modified_base (1605): a, t, c, g, unknown or other
  modified_base (1635): a, t, c, g, unknown or other
  modified_base (1637): a, t, c, g, unknown or other
  modified_base (1654): a, t, c, g, unknown or other
  modified_base (1674): a, t, c, g, unknown or other
  modified_base (1695): a, t, c, g, unknown or other
  modified_base (1852): a, t, c, g, unknown or other
  modified_base (1866)..(1965): a, t, c, g, unknown or other
  modified_base (1968)..(1980): a, t, c, g, unknown or other
  modified_base (1982)..(2009): a, t, c, g, unknown or other
  modified_base (2020): a, t, c, g, unknown or other
  modified_base (2022)..(2023): a, t, c, g, unknown or other
  modified_base (2025)..(2042): a, t, c, g, unknown or other
  modified_base (2044)..(2049): a, t, c, g, unknown or other
  modified_base (2051)..(2062): a, t, c, g, unknown or other
  modified_base (2065)..(2066): a, t, c, g, unknown or other
  modified_base (2069)..(2072): a, t, c, g, unknown or other
  modified_base (2074): a, t, c, g, unknown or other
  modified_base (2078): a, t, c, g, unknown or other
  modified_base (2081): a, t, c, g, unknown or other
  modified_base (2087): a, t, c, g, unknown or other
  modified_base (2091): a, t, c, g, unknown or other
  modified_base (2097): a, t, c, g, unknown or other
  modified_base (2105)..(2106): a, t, c, g, unknown or other
  modified_base (2124)..(2125): a, t, c, g, unknown or other
  modified_base (2129): a, t, c, g, unknown or other
  modified_base (2133): a, t, c, g, unknown or other
  modified_base (2151): a, t, c, g, unknown or other
  modified_base (2153): a, t, c, g, unknown or other
  modified_base (2159): a, t, c, g, unknown or other
  modified_base (2164): a, t, c, g, unknown or other
  modified_base (2166): a, t, c, g, unknown or other
  modified_base (2190): a, t, c, g, unknown or other
  modified_base (2210)..(2212): a, t, c, g, unknown or other
  modified_base (2227): a, t, c, g, unknown or other
  modified_base (2233): a, t, c, g, unknown or other
  modified_base (2247)..(2248): a, t, c, g, unknown or other
  modified_base (2251): a, t, c, g, unknown or other
  modified_base (2292): a, t, c, g, unknown or other
  modified_base (2294): a, t, c, g, unknown or other
  modified_base (2296): a, t, c, g, unknown or other
  modified_base (2318): a, t, c, g, unknown or other
  modified_base (2327): a, t, c, g, unknown or other
  modified_base (2344): a, t, c, g, unknown or other
  modified_base (2357): a, t, c, g, unknown or other
  modified_base (2366): a, t, c, g, unknown or other
  modified_base (2368)..(2369): a, t, c, g, unknown or other
  modified_base (2374): a, t, c, g, unknown or other
  modified_base (2377): a, t, c, g, unknown or other
  modified_base (2387): a, t, c, g, unknown or other
  modified_base (2391): a, t, c, g, unknown or other
  modified_base (2406): a, t, c, g, unknown or other
  modified_base (2432)..(2433): a, t, c, g, unknown or other
  modified_base (2437): a, t, c, g, unknown or other
  modified_base (2454): a, t, c, g, unknown or other
  modified_base (2470): a, t, c, g, unknown or other
  modified_base (2477): a, t, c, g, unknown or other
  modified_base (2480): a, t, c, g, unknown or other
  modified_base (2499): a, t, c, g, unknown or other
  modified_base (2536): a, t, c, g, unknown or other
  modified_base (2725): a, t, c, g, unknown or other
  modified_base (2814): a, t, c, g, unknown or other
  modified_base (2840): a, t, c, g, unknown or other
  modified_base (2867): a, t, c, g, unknown or other
  modified_base (2890): a, t, c, g, unknown or other
  modified_base (3118)..(3163): a, t, c, g, unknown or other
gggggaacgacgaaagaagcgggaaaagggggggagacaggcgggggggacaggcacaggaaaacaagagaaaaaaaaaagcaggggggaggggaaaagaagggggagagggggaaaagggagggaaatagccgcaaagagagaggagaaggaagagcggggacgggaggagaagaaggcagaagaaaagacgggcgaaaatgacgggggaaggagagagagggcaacaacggggcagaaaagaaggggcaaaaagggggagaaaaagaggacagaggagaaggggaggagaaacggagggagacagaaggaggagaaagaagaggggagaaagaggagcgaaaagccagctgagagggcagaagggacacaacgaaggggacgacgagaaagcgcagaggaagcgggggagaagaaaaggagaggaaagaacaccggagaggaaagagaacaggagggaacgaaggcaagagagaagggggaggaaagaggagaaacgcggaaagagtgacgagcagagaagaccggagacaggagaaggagggggtgcagggannnnnnnnnnnnnnnnnnnnnnnnnnnnnnnnnnnnnnnnnnnnnnnnnnnnnnnnnnnnnnnnnnnnnnnnnnnnnnnnnnnnnnnnnnnnnnnnnnnnaannnnnnnnnnnntnnnnnnnnnnnnnnnnnnnnnnnnnnnggggggnnnntnnnnnnnnnnnnnnnnnnnnnnnnnnnnggnnnnngnnnggngngnnnggggngnggggggggggggggggggggggggggggggggggggggggggggggggggggggnggggggggggggggggggggggggnggggggggggggggggggggggggggggggggggggggggggggggggnggggnggggggggggggggggggggggnggggtgggggggggggggggngggggggggggggggggggggggggggggggggggggggggggggggggggngnggggggggggggggggggggggggggggggggggggggggggggggggggggggggggggggggggggggnnggggggggggggggnnngggggggggggggggtggggnnngggggggggggggggggttgggnggggggcgggggggggnggggggggggggggnggggggggggggggggggggggggggggggggggggcggngggggggggggggggggccgcgggggcccgngggggggggggggnnggggggttcgggngggggtgtttgtgtggtttgtttgttttttttttttgttttgttttgtttctttttgttttttctcctcttctttcttcctcttttctcctcctctttctccttctctctttctcttcctctccccgcctccttcgtcgctcctctcttctcctttctctctctttcctctttctcccctctttgctcctctccttctctcttttcctctctctttctctctcnctctgcctctctgcngtctgctgctcctctccgcctcctcttcttctcccctccttctncctctctcgcattctgtcgtctcttctcttcttctctcctgtcctctcttcctcttnctcntcctcgcgtctctcctctgtctctctgatncnccgtttcttcttctttncttccttcctctccgtctcnctcatgtcatcgcgcgctttntactttctctccgtctcttgtgcgctgtgtccactcttcttcaagcactcactgtcatatatcttctagtacggttctatactcatacaacacttcataacatcttcacatataacacacactatctacaatataacactgcactcctatatactcnacatctactccaannnnnnnnnnnnnnnnnnnnnnnnnnnnnnnnnnnnnnnnnnnnnnnnnnnnnnnnnnnnnnnnnnnnnnnnnnnnnnnnnnnnnnnnnnnnnnnnnnnnaannnnnnnnnnnnntnnnnnnnnnnnnnnnnnnnnnnnnnnnngggggggggtntnntnnnnnnnnnnnnnnnnnngnnnnnngnnnnnnnnnnnnggnnggnnnngngggnggngggggngggngggggngggggggnngggggggggggggggggnngggngggngggggggggggggggggngngggggnggggngngggggggggggggggggggggggngggggggggggggggggggnnnggggggggggggggngggggngggggggggggggnnggnggggggggggggggggggggggggggggggggggggggggngngngggggggggggggggggggggnggggggggnggggggggggggggggnggggggggggggngtttggggngnnggggnggngggggggggngggnggggggggggggtgngggggggggggggggggggggggggnngggnggggggggggggggggngggggggggggggggnggggggnggngggttttgggggggggggnggggggggggggggggggggggggggggggggggggngggggggggggggggttgggtggtgttttttttgttgtgttttgtttgttttgtggtgttggtttgtttgtttgttggtttttgtgtgtgggtttttgatgttttgtgtgggtttttttgtttgtgttttgttgtgttcgttttttttgttgtttgttgtgttgtttgtgtgttttgttgtttgttttngttgtgtttttttggttgtgtgttttggtgttgtttgttgttgtgtttgtttgttgttttgttttttttgtttttgttttgttggtttngttttggtggttgtgtgttgtttgtngtttgttttgttgtttgtgttgtgttnggttgttgtttgttttgtactgntttgtgttatttgttgtgttctgttgtcttgttgtttgtctggccgtgtggtctttcccctttcttgccctagtctgttccttcaccttttaccgtgtgcgtcttcgacgaagtatctaatcttactcagcaacaacactttcacactatcatcattatcattacataccgttaagcaagaagatcctcttatctactcgacacaatactactcctctacctaacacnnnnnnnnnnnnnnnnnnnnnnnnnnnnnnnnnnnnnnnnnnnnnn

SEQ ID NO: 1858 - protein, 920 aa, Homo sapiens
  MOD_RES (119)..(166): Variable amino acid
  MOD_RES (168)..(188): Variable amino acid
  MOD_RES (206): Variable amino acid
  MOD_RES (215): Variable amino acid
  MOD_RES (231): Variable amino acid
  MOD_RES (233): Variable amino acid
  MOD_RES (240): Variable amino acid
  MOD_RES (247): Variable amino acid
  MOD_RES (265): Variable amino acid
  MOD_RES (289): Variable amino acid
  MOD_RES (294)..(295): Variable amino acid
  MOD_RES (302)..(303): Variable amino acid
  MOD_RES (310): Variable amino acid
  MOD_RES (316): Variable amino acid
  MOD_RES (321): Variable amino acid
  MOD_RES (334): Variable amino acid
  MOD_RES (345): Variable amino acid
  MOD_RES (349)..(350): Variable amino acid
  MOD_RES (354): Variable amino acid
  MOD_RES (429): Variable amino acid
  MOD_RES (434): Variable amino acid
  MOD_RES (448): Variable amino acid
  MOD_RES (467): Variable amino acid
  MOD_RES (469): Variable amino acid
  MOD_RES (479): Variable amino acid
  MOD_RES (485): Variable amino acid
  MOD_RES (492): Variable amino acid
  MOD_RES (499): Variable amino acid
  MOD_RES (551): Variable amino acid
  MOD_RES (556)..(603): Variable amino acid
  MOD_RES (607)..(627): Variable amino acid
  MOD_RES (629): Variable amino acid
  MOD_RES (631): Variable amino acid
  MOD_RES (633): Variable amino acid
  MOD_RES (635)..(636): Variable amino acid
  MOD_RES (642)..(643): Variable amino acid
  MOD_RES (645): Variable amino acid
  MOD_RES (651): Variable amino acid
  MOD_RES (653): Variable amino acid
  MOD_RES (655)..(656): Variable amino acid
  MOD_RES (664): Variable amino acid
  MOD_RES (670)..(671): Variable amino acid
  MOD_RES (676): Variable amino acid
  MOD_RES (678): Variable amino acid
  MOD_RES (683)..(684): Variable amino acid
  MOD_RES (698)..(699): Variable amino acid
  MOD_RES (706): Variable amino acid
  MOD_RES (709): Variable amino acid
  MOD_RES (715): Variable amino acid
  MOD_RES (719): Variable amino acid
  MOD_RES (722)..(723): Variable amino acid
  MOD_RES (725)..(726): Variable amino acid
  MOD_RES (729): Variable amino acid
  MOD_RES (731): Variable amino acid
  MOD_RES (736): Variable amino acid
  MOD_RES (744)..(746): Variable amino acid
  MOD_RES (752): Variable amino acid
  MOD_RES (757): Variable amino acid
  MOD_RES (759)..(760): Variable amino acid
  MOD_RES (767): Variable amino acid
  MOD_RES (779): Variable amino acid
  MOD_RES (842): Variable amino acid
  MOD_RES (872): Variable amino acid
  MOD_RES (880): Variable amino acid
  MOD_RES (889): Variable amino acid
  MOD_RES (897): Variable amino acid
MTGEGERGQQRGRKEGAKRGRKRGQRRRGGETEGDRRRRKKRGERGAKSQLRGQKGHNEGDDEKAQRKRGRRKGEERTPERKENRRERRQERRGRKEEKRGKSDEQRRPETGEGGGAGXXXXXXXXXXXXXXXXXXXXXXXXXXXXXXXXXXXXXXXXXXXXXXXXGXXXXXXXXXXXXXXXXXXXXXGGGGGGGGGGGGGGGGGXGGGGGGGGXGGGGGGGGGGGGGGGXGXGGGGGGXGVGGGGXGGGGGGGGGGGGGGGGGXGGGGGGGGGGGGGGGGGGGGGGGXGGGGXXGGGGGGXXGGGGGLXGGRGGXGGGGXGGGGGGGGGGGGXGGGGGGRGGPXGGGXXGVRXGVFVWFVCFFFLFCFVSFCFFSSSFFLFSPPLSPSLFLFLSPPPSSLLSSPFSLFPLSPLFAPLLLSFPLSFSLXLPLCXLLLLSASSSSPLLXPLSHSVVSSLLLSCPLFLXLXLASLLCLSDXPFLLLXFLPLRLXHVIARFXLSLRLLCAVSTLLQALTVIYLLVRFYTHTTLHNIFTYNTHYLQYNTALLYTXHLLQXXXXXXXXXXXXXXXXXXXXXXXXXXXXXXXXXXXXXXXXXXXXXXXXGGGXXXXXXXXXXXXXXXXXXXXXGXGXGXGXXGGGGGXXGXGGGGGXGXGXXGGGGGGGXGGGGGXXGGGGXGXGGGGXXGGGGGGGGGGGGGXXGGGGGGXGGXGGGGGXGGGXVWXXGXXGGXGXGGGVXGGGGGGGXXXGGGGGXGGGGXGXXGFWGGGXGGGGGGGGGGGXGGGGGWVVFFLLCFVCFVVLVCLFVGFCVWVFDVLCGFFCLCFVVFVFFVVCCVVCVFCCLFXLCFFGCVFWCCLLLCLFVVLFFLFLFCWFXFGGCVLFXVCFVVCVVXGCCLFCTXLCYLLCSVVLLFVWPCGLSPFLP

SEQ ID NO: 1859 - DNA, 982 bp, Homo sapiens
  source (1)..(982)
  CDS (201)..(782)
tatgaaaatgaaaaggcaaaggagaaattggaaaacaatctgcaaaacgtatctgacaaaggaattatgtctagaatatatgttttaaaaactcttacaactaagtaatataaaaagaaaaaagtccattcaaaaaaatgggcaaaaaattgaacagacacttgaccaaaaaaaatatatagcaatggcaaaaaaagtacatggaaagatacttaccacacatcatcagtgacatgcaaatcaaaccagtgagatactactatacacccactagaatggccaacattagaacaaatgataaatacaaaaggttgggaaagacatggagcaactggaactccttagtaactgctgctgggaaggtcaaatggtacagtttggtagtttctgaaaatattaaacatagatcttccttcaaccctgccatgctaggtattcatccaagagaaataagaacatgtccacacaaagatttgtccacaaatgttcatagaagttttaattgccccaaactggaaacaatccaaatgtccaagatgggaatggatagacacattgtgatatataaaaacaatggaatactactgagcaataaagaggagggaattactgatacatgcaacagcatagataaatctcagaaacattattcttcccaaaaggaaccagacacaaaagaatacatactatgtgattccattttatctgtactgacagaaagcaaatcaattattgcttggggcatgagaaatttttttgtgagtaatggaaacatcctctaacatgattgtagtgatgtttacctgactgcatacatttgctaaaactcatcaagttgtactcttaaaattggtgaaatttattgtcttaattctgtctcaatttttaaaaatgaggcagctctacaaggtacatatggaatagactccaaagttcatagttaagtggaaaaaactaggtgcagaaatatgtatacagtata

SEQ ID NO: 1860 - protein, 193 aa, Homo sapiens
MERYLPHIISDMQIKPVRYYYTPTRMANIRTNDKYKRLGKTWSNWNSLVTAAGKVKWYSLVVSENIKHRSSFNPAMLGIHPREIRTCPHKDLSTNVHRSFNCPKLETIQMSKMGMDRHIVIYKNNGILLSNKEEGITDTCNSIDKSQKHYSSQKEPDTKEYILCDSILSVLTESKSIIAWGMRNFFVSNGNIL

SEQ ID NO: 1861 - DNA, 856 bp, Homo sapiens
  source (1)..(856)
  CDS (201)..(656)
gagccacctagggcgtaaacccacgccaccccctgcccgcgcctcctctgtcctgcgaatgacactctggggcgccgtccagcaggtggctgcctctcaaccacctgtgcagtgagcacgagtgtgtgtggcggaagcggcccaggccccacgctccgcctacagcccatccggcacccacctcacagacgtgctctcatatgggacaggcaccagagtggcagtatgtccccagccggctcccggctgcctcacccatggcagcagcccacgcaagagccacctccattcaccgcttttcctcactggtcacaatcgcctgtcccaagttctggggctgcagccttcaacgttcgtcatcgctctccctgcacctacagctacagcccacacccacgccaccatcatctcttccccagacagccgcacaaacccgcacacagcgcgcctcctcccaccgcctggcgggtcctcttccagcaccttcctgtggtgggcgggtctggcccacacgccacctccccaaggctccttccccttcagagctctgccacgctcagagcacaccatgcttgggtctgggttctttttgtttcacatcctaccaggacacagccactcccttgggggcggagatggggttttgtttgttctgaaacggagtctcgcactgtctcctgggctggagtgcaacggcgcaatctaggctcactgcaacctccgcctcccgggttcaagcgattctcctgcctcaacctccctcgtagctgggattacaggtgccccctcccacaaccggctaaatttttgtatttttagtagagatggggtttcactgtgttagccaggctggtct

SEQ ID NO: 1862 - protein, 151 aa, Homo sapiens
MGQAPEWQYVPSRLPAASPMAAAHARATSIHRFSSLVTIACPKFWGCSLQRSSSLSLHLQLQPTPTPPSSLPQTAAQTRTQRASSHRLAGPLPAPSCGGRVWPTRHLPKAPSPSELCHAQSTPCLGLGSFCFTSYQDTATPLGAEMGFCLF

SEQ ID NO: 1863 - DNA, 931 bp, Homo sapiens
  source (1)..(931)
  CDS (201)..(731)
aacctcttgtctcctgggttcaagcagttcttctgcctcagcctcccgagtagctagaactacaggcttgtgccaccacacccggataatttttaaattttcagtagagacgggcttttggcatgttggccaggctggtctcaaactcctgacttcaagtgatctctcctcctcggcctctcacagtgctgggattacagatgggagacaccgcgcccggccccagattgttttctcttttttttttgagattgagtcttgctctgtcacctaggctagagtacagtggctccatcttggctcactgcaacctccacctcctgggttcaagcgactctcctgcctcagcctccagggtagctgggattacaggcacgcaccgccacacccgtctaatttttgtatttttagtagagacggggtttcgccatgttggccaggctggtctcagattcctgacctcaagtgatctgcccgccttggcctcccaaagttctgggattataggcatgagccactgcgcgccggcaattgttttcatacatatatacctatacatgtttcagagacatgcagcagatcccaagtgcctccagggcagcgatctgggagggcttttccagttgctgacctcacacctgtgccgtagacagacccaaggccagctggggatggtgggcggatcttccctactcctggagttttcaaaggatggcaacagagcaggttgataggtgaacagttaattcagtacagttagtatttattattattttttgagatggagtcttgctctgttgcccaggctggagtgcaatggtacagtcttggctcactgcaacctccgcctccggggttcaagcaattctcccgccccagcctcctgagtagctgggattacaggcgtgcaccaccatgcccggctaatttt

SEQ ID NO: 1864 - protein, 176 aa, Homo sapiens [sequence omitted]

SEQ ID NO: 1865 - DNA, 11995 bp, Homo sapiens
  source (1)..(11995)
  CDS (201)..(311)
  CDS (6139)..(6336)
  CDS (7558)..(7768)
  CDS (11216)..(11426)
  CDS (11645)..(11795)
  modified_base (68): a, t, c, g, unknown or other
  modified_base (86)..(185): a, t, c, g, unknown or other
gtcacccaggctggagtgcagtggcatgatcttggctcactgcaacctgtgtcgcttgggttcaggcnatctcgtgcctcgccccnnnnnnnnnnnnnnnnnnnnnnnnnnnnnnnnnnnnnnnnnnnnnnnnnnnnnnnnnnnnnnnnnnnnnnnnnnnnnnnnnnnnnnnnnnnnnnnnnnnnctaaatgaaacataaatgaagataaatgggccagtcgcggtggctcacgcctgtaatcccagcactttgggaggcttaggcgggcagatcacgggtcaggagttcgagtacagcctggccaacatagtgaaaccccgtctctactaaaaatacaaaaaattagccggacgtggtggtgggcacctgtaatcccagctactcaggaggctgaggcaggagaatggcttgaatccgggaggcggaggttgcagtgagctgagatcgcaccattgcactccagcctgggcaacagagcaagactctgtctcaaaaaaaaaaaaaaaaaaaaaaagagagttcaagaccagcctggccaacatggtgaaacctcgtctctactaaaatacaaaaaaaaattagccaggcgtggtggcgggcacctgtagtcccagctcctcgtggaggctgaggcaggagaattgtttgaacccaagaggtggaggttgcagtgagccaaggcagcctggatgacgagggagactccatctcaaaaaaaaaaaaaaaaagataaatggatttaggttttaatgtttttaaaaaataaataaaatttccacatgaaatttgtaattttaaaaacgttacatagctgggcacagcagcagtgaactcctgtggtcccagctccttgggaggctgaggtgggagtatcagttgagcccaggaattggagtctgcagtgagctatgtgatcacaccactgcactccagcttgggcgacagagcaagactttgtctttaaaaaaggttaccgagacatgtagacacagaaaagcatgggctgaagactactgggagtagcaaagtcagcaggataggatatggaaatttgttacctgcttgagtgccctgtaaatgggtggccagacagaactgctcctggtgtcatgcgtggtttcagcaacttccacaagggggtggggttagaaggttctctcccatccttgtcaaagttgctaaaaccacgcacgacgccatgtgcagttccgtctggcagcccatttacagggctctcgtggtgggtgctgtctgcccaagctttcttgaccaggcttctctgaaggaagtttctctttgaaagaaaggaaacttgtggttgtcacaaccgatcgtggttatggaggcatttctccctaagcttactgaatggtgtcttgcaggtcttttccatggtggtcaccaatgttgccgccagcatggtaacatttggcagtgtggtattgagggtctttcctctgttttgcatccacagcagaggtctttactttttaccaaggagtgagtgggtttggaatgggttcccccctctcttagtttttggagacggggtctcgttctactgcccaggctggagtgcagtggtgcaccatagctcactgcagccttaaacttctaggctcaagtgattgtcctgccttggcctcccaaagtgctgggatgacacgtgtgagccactgcgcctggtcaccgtataccaaggaatgagtgggtttggaatgagttccctctcttttctttttttttttttttaagttacagtttgctttttgagatggagtctcactttgttgcccaggctggagtgcaatggtgggatcttggctcactgcagcctctgcctcccgggttcaagcgattcttctgcctcagcctcccgagtaactgggactataggcacacaccagcacacctggctaggtttcctctcttttttttttttttgagatggagtctcactctgtcgtcctggctggagtgcagtggtgtgatctcggctcactgcaaactccatgccccaggttcaagccattctcctgcctcagcctcccgagtagctgggactacaggcgcccaccggcacgcccggctaatttttttttgtatttttagtagagatggggtttcactgtgttagccgggatggtcttgatctcctgacctcgtgatccgtccacctcggcctcccaaagtgctgggattacaggcgtgagccaccacgcccggctcctctcttttctagaaggaatgttctccttctcaaaaggaaggtttctcctttgtgcttctccaaatgcaacaacaggatgtgtgtgtggtaaagggtgggaacactcagggcaatgatgtgctccaggtgagcagaagggagagaggttccagaaccttctctgccaaatgttcctgggagcaaatcagagccagccaagaaggggaagctgttagagtctctcttaccccattatttccaccaaaggcaccgaaaaagaaagggaagaaaggcaaagccaaaggcaccccgattgtcgatgggctcgctccagaggacatgagcaaggagcaggtgagcagagcgggctgtggcccagtccccgggtgggcgtgggcgggcaccacgcagggtgcctacgccgagtgtccatcttgccatgtggatccacccttctgtccaagccagaacacgccccccgcgtggcccataattcccatcagcggcaaagctttcggctgcaccatgtcttttcagaaaggtagtgcagcctgtgaaagagctttgtaacagggtggtaggagtgtggaaggacatgcttttctgatctaaaagctgtttttaatttcgtgtattctctttcaatcttaccctttttttgcacctgatgtgtatagacttatcgtagaacacacatgtagcattctcctttattttatttaccattaaacattatgtcaaaaaggaagtttttgaaagaaggatgatttacttcaaatcacatctgaatctgattaatcgttcatttttttttttttttttttttttttttgagacggagtctcactctgtcgcccaggctggagtgcagtggcgcgatctcggctcactgtgagctccacctcccgggttcacaccattctcctgcctcagcctcccgagtagctgggactacaggcacctgccaccacgcctggctaattttttttttgtatttttagtagagacggggtttcaccgtgttagccaggatggtctcgatctcctgacctcgtgatccactcgcctcggcctcccaaagtgctgggattacaggcatgagccaccacgcctggccagtcattcattgtttttgataaaagtcccaacaaggagtaacagcatcagggctgcctttttcttgttgcttattttggggaggaggtgatgtttttatagtttctttgtaggagttagtttaagtctcttcttcatttggatgtagttaagggctacagaacataattacataattacaattttacctaaaaggctcctggagacggcagtgtgtggcaagcacggtgcaccctctggcctctgccctcatggacgactgcctgtgagcacctgacatgggacatgagggctgtgtcaactctgtgttattgttaataaatcttaccttcttttgatagttgtaagataaaaaatcaatacgaaggagactgaaagagtctcatgacctgaagttggagctaggcagaggtccttgaacaatggtaaagaatggctttattttacatgcaggcaaaccattggcagtttaagccagtggctaagcagagaggtgatggggtcaggtttgtgttctggaaagatgtctggagctgctggatggagaatggattgaacactgcgttgtcccagcatgtgagctgctgcccgtctccctgtccgcttcccattcctgtggagacaggccttgtggggcagtggccatggagcctacggggcagcctacggggcaggctacggggcagcttacggggcaggctatggggcagcctacggggcaggctacggggcaggcccttgcactgcacatcgcacgttgagccacagactcagaaggcttcttcagggtccaggcaggtggggagggatgggggtgacctggagactcctgccccgcagcagaggacagtttcatctgttcactggggagtgccttgtgggcctaggagttcagtgctgtttttttctgattttccaagagaagctggaaatctggatatttataagaaatctgaatattgagtgatggcaaaatctcaacaccatgtgagccaaacagaccagtcaggagccctggttcaggctctgcccaggagcctctaaaggtctgtgacgtgaagacatttgtcgttgtgccgaggcactggttggattcgggggtgcgtgtctccctcatgtctgcccggcatcctcggctcagaacccctcctgctgctccttcttgtttgctcgttgtcttgtcttcttttgaggtgagaaatgtgttttccctgtggggaatgtggtgttgagaaagaaaaaggctcacagtaagtggcctggggctgtgcccgaaaagtaactgattctgacggaatctcgctgtgtggcccaggctggagtgcggtggcgcgacctcggctcactgcaagctccacctcctgggttcacaccatcctgctgcttcaggctgcccagtagctgggactgcaggtgcctgccatcacgcccggctaatttttttgtatttttagtagagacgaggtttcaccgtgttagccaggatggccttgatctcctgacctcatgatctgcctgtctctgcctcccaaagtgctgggattacaggtgtgagccaccgcgcctggcagtaactgattcttaagggaaatgagctcccgagaaagctggaagcctgtcctacatttttttttaacctatttgcagattcgcaattgaaccctcttgagattttagagtctactggttttgtatattttttgcttaacattatatcttcaaaggtgaattttttttcatttagcattatgatatgaatttgtttaaatgctgctacatcatttgcatattttttttgggttaatgtgatatttctcctagttgatatactctaatttttcaaccatttccatatttatttatttattgtttagagacagggtcctgctctgtcacccaggtggagtgcagtggtgtgatcacggctcacggcagccttgacctcccaggtccaaacgatcctcctacctcagtcttctgagtagctgggactataggcatgtgccaccactcctggctaattttttttttttttttttttgtagagacagggttttgccatgttgcctaggctgttcaactctggggctcaaaagatcctcccaaagtggtgggagccaccatgcctggctgtttgtgtattttttgagacagattctcactctgtcacccaggctggagtgtagtggcatgatcataactaaccgcagcctcaaccccctgagcttgagtgaccctcccacctcagctctcccagtagctgagactataggtgcgtgccatcatgcctagttaatgaaaaaaagtttttgcagagatggggtcttgctatgttgcccaagctggtcttcagctcctgggcgcgagggatccttcaacctcagcctcccagagtgctggggttgcaggcgagagccaccgcgcctcgcttatttccctgtttaaactggtcttaggttatttcctttttgatatttttgctgttgtaataatggtgtgggtaatatctttgagcaagatgctcttatatttcttttgagaaattttttaggcatcaattctcaggaatggatgaaaggatctagttattttatgattattggccaaattgaagagaattctgccacctgctgaatgcattctgtctccggagcttcctagccttatattttaactttttacatttagctgtttatttttaggtgaagttgagtcctccctctttcttccttgcctttcgccggccacacgccccgttgccgtgcatgggcccctgctcagtgcctcacctgacccactgcacctggccaggtggaggagcatgtcagccgcatccgggaggagctggaccgcgagcgggaggaacgaaactacttccagctggagcgggacaagatccacaccttctgggagatcacacggaggcagctggaggagaagaaggctgagctgcggaacaaagaccgggagatggaagaagccgaggagaggcaccaggtggagatcaaggtgagtggggccggcctgcacgtgctaacctggtcaccacagagccccagaggagctggatccagtgagggtgcaggtgggacattttctgttcttggctttgggagtcacagccttaaaggtgttttttataaaagcctgagggagagaccctgcaggtcctgagggtttaaaatgctgcctccacaacatggaaggaatatgggctctgggggcagactggcctgtttgcaactcagctctgccacttaataccccatgagctggggatgcacctcacctcccagccttggtgtcctgctctgtgcctcaagtgtacaggtttgcataggtgaacaggcatgtgtagctgtgtaaaggtgaggcatgcaagtgagcaggtggatgcaagtgagcatgtgtgtgcaggtgaggaggcgtggccaggtgaggaggtatgtgcaggtgaggtgtggggaggtgagcacgtggggcaggtatgtgcaggtgagcaggtaggtgcaagtgaccaggtgtctacaggtatgtacaggtgaggaggtgtagtacaggtgtagtgcaggcgaccaggtgtgtacgggaatttacaggtgaggaggtgtacaggtgaccaggtgtgtacaggtatggacaggtgagaaggtgtggtacaggtgtggtgcaggtgagcaggggggtacaggtatgtacaggtgaggtgtgttacaggtacggtgcaggtgatcaggtgtatacaggaatgtacaagtgaggaggtgtggtacaggtgaccaggtgtgtacaggtatggacaggtgaggaggtgtggtacaggtgtggtgtgggtgagcaggagtgtacaggtatgtacaggtgaggaggtgtggtacaggtgaccaggtgtgtacgggtacggacaggtgaggaggtgtggtacaggtgtggtatgggtgaccaggtgtgtacaggtatggacaggtgaggaggtgtggtacaggtgaccaggtgtgtacgggtacggacaggtgaggaggtgtggtgcaggtgtggtatgggtgaccaggtgtgtacaggtatggatggacaggtaaggaggtgtggtacaggtgaccaggtgtgtacaggtatggacaggtgaggaggtgtggtacaggtgtgctatgggtgaccaggtgtgcacaggtacggaaaggtgaggaggtgtggtgcaggtgagcagatggtactcccattgccctgcaggtgtacaagcagaaagtgaagcacctgctatatgagcaccagaacaacctgacagagatgaaggctgagggcactgtagtcatgaagctggcacagaaagagcaccgcatacaggagagtgtgctgcgcaaggacatgcgggcactgaaggtggagctcaaggagcaggagctggccagtgaggtggtggtgaagaacctgcggctggtaggtgtggcgggggcacctggaggctgacaggttgttgggacggcaagcctagtgctgcatgaactcctgtttattcaacagcaactgggaattcatatttctgcataagactttctgcatttttgcaatttgttgaaaaaaatttttttaaagcatgcatccaaacaaaccccattttgggaccaagtacacaattctgtctcagacctgagcaaaaaattgacgtcaccgaagagaaaaaatccagcttaggatctttcatgtgctgctgacacctgacacccagagacttttcctagggaatagcatcatatgcatttagtagaatgcaaaccaaccattaaaatatccagtgtgttgactcctgggcactgtgacagtttgtcacacaagctggtctgatttttacttttgaggctgggggtttccagggcaccattaaaattcatctgtgcacctggttcagtggctcacacccaaaatcccagcacttgggagggtcaggtgggagaagtggttgaggccaatagtttgagactagcttgggtgaaatagttgaaccccatgtctaaaaaatttaaaagaaaacattagctggtgtagtggcacatgccgatagtttcagctacttgggaggctgaggcgggaggatcccttgagctcaggaagtcaaggctgtggtgagctaggattgtgccactgcattccagcctaggtgacagagtgagacaaaacaaaaaggaaagagatcatttgctgagtgtccattagctgctaggtcctgatctgatctctgacaaaacgcctgcccgactggggctgttggtctagaaaggagagacaacaggtgagttggaagacaaaataaacgtgccagatacaacagagtatctggtggggaagagtgccatagaaggatcgaagtggggagaggtggggtgcggttttgtacaagcagttgaccggctgggagacgggatgggccagtgggaaagctcagagtgaccaggaggagactgtgggagagggtcagagcttgtccgcctcgaaagccgtggtggggactggagacgggtcagagctcgtccgcctcgaaagccgtggtggggactgggactttgaccctggtggagtctgttgccctctgagaacttgggcagaggagagatgtgtctcactaaggttcttcctggctgctgggttgaggagactttctgaacacatttgcctcacgcctggaagcagtccagcctccactgaatctggaagaaacttggtgacgttgctgacttcgcagcaaagcctgagagtgccgaagtcttgagccctccagaattagctggtcttaacccaggtcctggatatgatattgttacataatcagagtttcctgttgggtaaaaatatggctttaggccgggtgcggtggctcacgcctgtaatcccagcactttgggaggccgaggagggtgtatcacgaggtcaggagtttgagaccagcctgaccaacgtggtgaaaccccgtctctactaaaaatacaaaaattagccgggcgtggtggcgcacacctataatcccagctactcgggacgctgaggcagaagaatcacttgaacctgggagacggaggttgcggtgagccgagattgtgccactgcactccagcctgggcgacagtgtgagagtctgtctcaaaaaaaagaaaaattactgctttaaaaataatttatttttttatgcaaattttaaatatataatgtttatttaaatatataataatagttcattaaaaatatatatttatttatttttagagatgaggtctcactctgtctcccaggctgcagtgcaatggtacaatcatagctcactgcagcctcgaacttctagtctcaagtgatccttctgccttagcctcccaagtagctggaactatagatatgagccaccacacccacctaatctttttttttttttttttttttttgagatggagttttgctcttgttgcccaggctggagtgcagtggcacaatctcagttcaccacaacctctgcctcccgggttcaagctattctcctgcctcagcctctcgactagctgggattacaggcatgtgccaccatgcccggctaattttgtatttttagtagagacggggtttctccatgttgttcaggctggtcttaaactcccgacctcaggtggtctgtccagctcggcctcccaaagtgctgggattacaggcgtgagccactgtgcccggcaatctttaaattttctgtagaagatcttgctatgttgcttaggctgcccttgaactcttgacctcaagtgatcctcctgccttggcctccagcgtgctgggatgacaggaatgaatccttttaatatgctgcttcaggcagcagtgcagcaggttggaagctacacacggcacctggaaagatcccacagctctgtgtggatgtggctgctgctcttcaggctgtgggatggtttggcgatggaaccaagcgggttcagtgctcacgacgtctgttcatgttctctctcaagcttagaggtgactttagttgagggaggtgagttagggaatatggaggtgaccaaaaccatgaggaacagggtcagcctgaagggagcgggcttccctctgtgtccggctgtgtagtaatggccgcttctccctgtgcagaaacacaccgaggagatcaccaggatgcggaatgattttgagaggcaagttcgaggtcagtttcccgtgtgctcattgtgtaggtgccagagacacccccgccccatcagagaggaatttacctccagagcttgttaactcagggagcaaaaactggattaaaacagccaaggcatgcaagagaaagaacatggaagtttccaaggccagtggacccactcagaatcccagaacaacctatttccatgtgagtttgggaggctgtgattaccacacacattcccactcctagctaaaatcagtagttatcagcaggtggtagctattcagtgccgtgggcagcattcttaaaatagtcttctccatggctcctggtctgagaaggctccaatttcagaagtctctgtgttttactaataaaggctgattgtggctgggtggccacacaggcctcggttactgctcactggggtcagctgacattcagctgttggcacccccagtgcagggagcgattagcaatgcctgtcactggcaaaggcaggccgacagtggtgtgtgtgctgagtgtgagcatcagcagaaaaactcagtctaaacccctttgttcttctcttgcagagcttttgcctgcaaggctgttctgaccacagtgggcgttttgggcccgtttacaggctccatgttctgtagccgtaggggcaccacgtcttcctctgctaagctgctgtttgctgctgcctttcagaaattgaggccaagtatgataagaagatgaagatgctgagggacgagctcgacttgcggagaaagactgagctccacgaagtggaggagaggaagaatggccagatccacacgctgatgcagcgccacgaggaggccttcaccgacattaagaactactacaacgacatcaccctcaacaacctggccctcatcaactccctcaaggtgctgtgcgtgggctgggctggggaggcacactctgcctgtcctagaatgtgggctgcagagtcctggggatccagaccccagctctccactccaacacacccagtactttttataagattatttgacaatgcccctctcatatccttaactgaaattcctaaataacgtaacctatctctacctattgttaaaagcagtcaggatattgccctcaccgtagtgcagagggggaagtaatgaagtgtgttgtggtttgtaaaagctcagatggaaccgcagtgagggccgtgatgtggctggagtggataggtgtcatagtcactgcctgcgacaggtggataggtgtcatcgtcactgcatgctggcagtgacaggattttctacagtagacaacggcccttggtggaatcttgaacaaagtatagtccttcagtctgcatggaagctgcattcccagaaaactcagaataagttgaagctgcagaaatactgtttatacatagaagacgtctaggtgccagcatgcctgaggctggcagcagctggtgatgggcaggagagcacccagctc

SEQ ID NO: 1866 - protein, 293 aa, Homo sapiens
MKINGPVAVAHACNPSTLGGLGGQITGQEFEYSLANIVEEHVSRIREELDREREERNYFQLERDKIHTFWEITRRQLEEKKAELRNKDREMEEAEERHQVEIKVYKQKVKHLLYEHQNNLTEMKAEGTVVMKLAQKEHRIQESVLRKDMRALKVELKEQELASEVVVKNLRLVEIEAKYDKKMKMLRDELDLRRKTELHEVEERKNGQIHTLMQRHEEAFTDIKNYYNDITLNNLALINSLKVLAEGEVMKCVVVCKSSDGTAVRAVMWLEWIGVIVTACDRWIGVIVTACWQ

SEQ ID NO: 1867 - DNA, 10794 bp, Homo sapiens
  source (1)..(10794)
  CDS (201)..(571)
  CDS (755)..(1186)
  CDS (3650)..(3857)
  CDS (5014)..(5841)
  CDS (7480)..(7648)
  CDS (9308)..(9513)
  CDS (9602)..(10594)
cgtggcagaattggaaaccgccccacaaaccttggcataaggtgcaaggtaatccagagctgtgacgtgcaaccgaaacttgtgggttttagtgaattttccaaagcaggtccccagcgacaccagcttgtccccggaaatattggcggccagcttcataatcttctcactaaaagggtaaagggggagcaaggttgcggatgaaggaggctcgtgggacccaggacccctctcccctgggtccatgctgcctgcccggccccgcctcacctcacatagtacacccggtcgttgtgcagacggaaacagtaggtgccatcgggccggtccaccagcagttgaagattctccccaatgctgagggcaaaaagaggactggagaccgcgcccgaacgaaccggtctccggcaccgcgcccccactccaccttggccaccacacccacacactcccgcgtccgccccgcgcgctcctactatttcgctatcttctcaaacatgacacgggtctcctcttcagtcaaaggccgcatttttccccctgggttggaacaccggatcctcgtgccttggtaactggaaacggaagtcggtcgctcgctgctccccggcaatcccaaagccttcctctctagccccgtaccaatagttcgtctcgctagcgcccaatagtctggacgaccgcaggggaaagcaagccggccggatgagaaagcatagagaccggaaatgtgcctgtttcttcctgtcctaagttcggagtcagcgccccttgtggtccggaagggaagtgacgttgttgctgggaagatggcgaccgcggcgactatcccatcggtagccacggccacagcagcggctctcggcgaggtggaggatgaagggctcctggcgtcgctgttccgggaccgcttccccgaggcccagtggcgcgagcggcccgatgtgggccgctacctccgggagttgagcggctcggggctggagcggctgcggcgcgagcccgagcgcctggcggaggagcgggcgcagctgctgcagcagacgcgcgacttggccttcgctaactacaagaccttcatccgcggcgccgagtgcaccgagcgcatccaccgcctgtttggcgacgtggaggcgtcgctcggccgcctgctcgaccgtttgcccagcttccagcagagctgcaggtgcgacgcgcctggcgctaaaggggttttataactgtaaaagctgacatttacgatggtagaaataactaacacataaagcgtttaccacgttccaggttctctgctgagcgctttattaatccatttaaacctcacaacagccttcgagataggtactgttattccttttttatcttttttgagacggagtctcgccctgtcgccaggctggagtgcagtggcgagatctcggctcgctgcaacctacctctgcctcctgggttcaagcgattctcctgcctcagcctcctgagtagcagggaccataggcgcgcgccaccacgcccagctaatttttttggatttttagtagagacggggtttcagcatgttggctgggatggtctcgatcttttgatgtcgtgatctgtccgcctcggcctcccaaagcgctgggattacaggcataatccactgcgcccagccctgttatttccattttacatatgagcaagtcaagacagagattagtgacgtccaaggacacagctaggaggtttcgaattcagaactggttacccagaagcacgtccctccctcgaagggcagttgtgggcacaaagaaaaaggattcatgcaaagctcttattatcgggtctgacacagttaacattataggtgtgagctgaatatatgtgcacatttatatacttattttatacgaaagcgtggaccggaggtcatctgcttcaaaacttccattgacgggaaggtgacaaggaaatcctcgcatttgagggcatcagatatcaaaaagtctctccatttggatggctggatgtggtggctcagcctgtaatcccagcactttgggagcctgaggcttgaacccaggagttcgagagcagcctggccaacatggcaaaaccctgtctctataaaataaaaaattagctggtcgtggtggcgtgcgcctgtagtcccaggtacacaggaggttgaggtgggggggtcagttgggcccgggagattgaggctgcagtgagccatgattgtgccaccgcactccagtttgggaggtcgaggctgcggtgggctgtgattgtgccactgcattccagactgggtgacaaagtgaaactctcttaaaaaaagaaaaaaaggctgggtgcggtggctcacacctgtaatcccagcactttgagaggccaaggcaggcggatcacgaggtcaagagatcgaggccatcctggctaacatgctgaaacccccatgtctactaaaaatacaattagctgggcgtggtggcacgcgcttgtagtcccagctactcgggaggctgaggcaggagaattacttgaacctgagaagcggaggttgcagtgagccaagatgatgcgtgccactgcactccagcctggtgacagagcaagactccgtctcaaaaaaaaaaaaaaaagtcctttgtgagtcatattctgtctccattatccctagttctgccttccagcctttcatgattaaagtttaatttttcttttgagcctttggatatttgacagcagcttttgtacccttccatgctccagaatagataggggacttgataaagcaggtctctgcaaatatggagaagtgttgaaagtagactgtggcaggaactatggttgaacattagcataggagaagatgaagacctgaggggaaagattgtggattctaggcagttagtgcttcattttgaaaataatgatagctactgttaaatatttaactgtgtctcttttactatttttactttgacgcattcgctctgtttcaagttctatgttaaatgcttcacacacatcatctcatttagttcttacacccttatgaggagggtcctatatactttttttttttttttttttgagacggagtcttgctttgttggccaggctgcagtgcagtggcgccatctctgctcaccgcaacctccacctcctgggttcaagtgattctcctgcctcagcctcctgagtagctgggactacaggcgcgcaccaccatgcctggctaattttttgtatttttagtagagatggggtttcacttgaactcctggcctcaagtgatccgcccacctcagcctcccaaagtgctgggattacaggcgtgagccactgcgcctggccctatataccgttttactaatgaggaaataggttcagagaggccaagtaccttgccacagccagcaagtggcatatctggatctccatctgttagatttattaattgtatgtttttggacaagttgcttaacctctctgggattaaaaatttcctcaattgtaataatacttaccttataggtggggtgtgaggaataaatcagatagatcatccagcccaatgttcatagcaggtacttggtaactgtagctaaggtttgggtacagagcagtgaaggatcaacattcttctgattattactaggaactttgtgaaggaagccgaggagatcagctccaaccgccggatgaatagcctgaccctaaaccggcacacagaaattttggaaatactggagattcctcagctcatggacacctgtgtccggaacagttattatgaagaggccctggagcttgcagcctacgtacgccgactggagaggaaatactcttccatccctgtcatccaggtagccaccttgcccagagaggactcaaagtaatgttcttgtaatcatttattctgtggtcaggactgaagctttaggtagaaactcttgcatgtttcacatcagtttctgccagccaggtatgcctgaacagaaaacattcatttattcaaaatacatattaatcatgtgccaagcactgctctatatgctggggatacagtgtgaataaagtggtcctggctctcatgcagcttacgtgctaatgggaagtctgataattgacaaagaaatgatatcatttcagatagtggtgtctgaagaaaaaaacagggaatggggtaagggagtctagggtaggtttctttaggtagggtgatcaagaaggactcttctagggaggtaacatttaagctgagacctaaatgagaaggaggtgccagcccacaaagatctggggagagagcaaaccagaaagtgtgaagaacaagtagagagggctgaagtgggcagaaattgaggtgtttaagggatacagaggcagccagggttaatggattgtagcagcgggagagcactaggaagcaggtgaagatggagagccaggtagggccaccagtgtaagtcccaacaagtggttggaattttcttgattgcagtgggaagtcactggaggattttaagcttttttttttttcttttttttttttgagacagagtctcgctctgtcccccaggctggagtgcagtggtgcgaccttggctcactgcaacctttatctcccgggttcaagtgattctcctgcctctgcctcccgagtaaccgggattacaggcctgcaccaccacacccacctgatttttatatttttagtagagacgaggtttcacatgttggccagattggtctcaaactcctgacctcaagtgacctgcctgcccacggtgctgggattacaggtttgagccactgcacctggccaggttttaagctttttaagcaagagagttaactaacctgatctttgttggtgaacctacaggcatcagctttaggaaattacttcacatttcaggaaagccatgggaatgttggtctgcagtcttcagagttaggggaatgggttctagagagcatccttcccagcgcagtgtgactctctctgtgtattgtcagggcatcgtgaacgaagtgcgccagtccatgcagctgatgctgagccagctgatccagcaactgaggaccaacatccagcttcctgcctgcctccgtgtcattggctacctgcggcgcatggacgtcttcactgaggctgagttgagggtgaagtttcttcaggcccgagatgcttggctccggtccatcctgactgccattcctaatgatgatccctatttccatattacaaaaaccatcgaggcctcccgtgtccatctctttgatatcatcacccagtaccgtgccatcttctcagacgaggacccactgctgccccctgccatgggtgagcacactgtgaatgagagtgccatcttccatggctgggtgctacagaaggtctcacaattcctgcaggtgctggagaccgacctttaccggggcataggcggccacctggactctctgctgggccagtgcatgtactttgggctgtccttcagccgggtgggagctgatttccggggtcagttggctcctgttttccagcgggtggccatcagcactttccagaaagcaattcaggaaacagtggagaaattccaggaagaaatgaactcctacatgctcatctcggctccagccatcctgggcaccagtaacatgcctgctgctgtgccagccacccagccggggacgctgcagccacccatggtgctcctagatttcccacccctcgcctgctttctcaacaatattctggttgccttcaatgatctgcgcctctgctgccctgtggccctggcgcaggatgtgactggggccttggaagatgcccttgccaaggtgagcacattctgttggttttctgctaccctgggccttctctggtaatgggtggccagatttttgtaataaacccgtctatttgacggtgtctgctgacatggagaggtctagtgtggttttggaggttctcctgattgagaagctctggccagttgcccttcatgggacctaggacagtccatgaagtgatttgcctatagtaacaattcggtaatacacgtattagctttctagtgctgcataacaaatttccacaaacttagtagcttccagcaacacatttattaccttccagttttggtgggtcaggagtccaggcacagcacaaccgggtcctctctgctcagggtcttacagggttgccatcaaggtgttggctggactatggcctcatctggaggttggggctccatttcagactcatgcaagttggcaggggtcagttctttgcaattgcagaactgaagcctcagctcctagaggctgtccactccataggcagctgacaacatggctgtttgcttcctcaaggccagcaggagagctactctcttgagtctcttcttttaggtacctccttttaaaaacttcatttgattaagtcagatgattagggactttaattacatctacaaaaccctttacctttagcatattcttttatttttattgttaaaagtgttttattttacagagagatagtgtctccctatgttgcctaggctggtctcaaactcctggactcaagtgatcctcctgctacagaccctcaaagtgtgggattacaggtgtgagtcacttgaacttgggaagtccagcatcagagtctgtgttcttaccctgtcgctatgccacatatctgtagtgtcagctaggctgctctgttggttttgaaacttctctttcctagctgttttcttacagttttccagtggttctagctttctgaaacctcggggcttagtagaaagcttgtatagttttgcttcattttcctggatccagcacagttctggttggtcctccgtggaagttaagaaccatgtattgggccgggcgcagtggctcacgcctgtaatgccaacactttgggaggctgaggtaggaggatctcttgaagccaggggctccagaccagcctgggcaacaaagcaagaccctgtctctacaaaaaattttaaaacttagccagacgtgatggtgcacgcctgtagtcccagctacttgggaggctaaggtgggagtatcccttgagcccaggagtttgaagctacagtgagctgattgtgccgctacactccagcttaggtgacagagcaaaatcctgtctctaaaaaaaaaaaaaaaaaaaccaaaaccatgtattctctctatagttttatgacactcctccactggaaccggaaactatacccgtaatgtaacaagttgggtctgaacttcacattaataaagtgacacaattgtggacaatgaccataattctgagtttaaatgagacagtaaaataatgtactgttaaattactttgttcaggaaaactggaggggcatacatttttttgcctagtttcatgcactgctgtcccagtggtgataggctgtcccagtaattgacggtgcccttgtctcttaggtaactaaaataatcctggccttccatcgcgctgaagaggctgccttcagcagcggggagcaagagctctttgtccagttctgcactgtcttcctggaagaccttgttccgtatttaaatcgctgtctccaagtcctttttccaccagctcagatagcacagactttaggtaagagaatgaaaattctgtaaactgccttactgatgtgtaattcacatactaaataattcatccatttgtgtaagtcagtgttttttagtaaatatgaatccaattttagaatatttccatcactccaaaaagatccttcatgcacgtttgtagtcattcctcgacagcatccttagtccctggcaacctactttctgttgccatagatttgcctcttctggacatttcataaaaatggaatcatacattatgtggctgtatctggctaagcggaagaagccagtcacaaaagaactacatacgtatgattccatttatgtgaaatatctagagaaatggtttttacagtcttttttttttttgaggcggagtctcgctgtgttgccaggctggagtgcagtggcacagtcttggctcactgcaacctccacctcccgggttcaagcaattctcctgcctcagcctcccgagtagctgggactacagactcgcaccaccacgcccagctaatttttgtgttttagtagagacggggtttcaccatgttggccaggatggtctctatctcttgacctgtgatccgcccacctcggcctcccaaagtgctcggattacaggcgtgagccaccacgcccgtcctaaagtcttttttccaattcactttcacgtccttgtccctttgtggtaggagaggggcttggttgaggcacagcttcccaaagggcaatgggtcagtgcatcacacgtgcaaagcctggctgccctctgctttttccctggtgctgcctgaggtctgggttcctgctgcaggcaccctacactgctgttccgttacgttctgcttcacagtatagcttcccattccctgtaacaaaggtggtttttgctgtattaaaacatagtaattgatggctgggcgcagtggctcatgcctgtaatccccagcactttgggaggccgaggcggatggatcacctgaggttgggagtttgagaccagcctggccaacatagtaactccgtctctactaaaaatacaaaaattagcctggcatggtggcgggcgcctgtaatcccagctaccacggaggctgaggcatgagaactgtttgaacctgggaggcagagattgccagtgagcagcaatcacgccactgcactccagcctgggcgacagagcgagactgtctcaaaaaaaaaaatagtaatggctcgttttttttcccttaaatttccttttttttttttttttttttttttgagacggagttttgctcttgtggcccaggctggagtgcaatggcgcgatctcggctaactgcaatctccacctcctaggttcaagcgattctcctgccttagccttcccaagtagctgggattacaggcctgcgccaccaagcccggctaatgttgtatttttaagagagatgggatttctccgtgtgggtcaggctggtctcgaattcctgacctcaggtgatccgcccccccctccccggcctcccaaagtgctgggattacaggcgtgagccaccgcgcccggcctcccttaaatttctatattgagttttattagtaactgttttccattttgctttccccacgtctgggttaggcattcctcccactcagctctccaagtacggtaacctagggcatgtgaacatcggcgccattcaggagcccctcgcctttatcctgccaaagagagagacgcttttcaccctggatgaccaggcgctggggcccgagctcacagctccagcaccagagcctcccgccgaggagccacgcctggagcccgcgggcccagcctgcccggagggagggcgagcggagacgcaggccgaaccgcccagcgtggggccctagccggcgtcccctgcctccagaacgcggtgcgtgaggttcccggcgcggggtggccaggactgcctcgccctggaaggtccggggcgggttcgggaggcgggaaggcgctcccgggaggagagcggaagggggcggtgctcactgccagtctaagcaggaaggcggggatccagtcgcggcttcgctgtgtgctggccgacggcgcttcccggcgtgccccgcgctgcggccggaaggggcgggccgggtcactgttaagggggccgccatggcccggctgtggggcgcgctgagtctttggccactgtgggcggccgtgccgtggggcggggcggcagccgtcggtgtccgggcttgcagctccacggccgccccggacggcgtcgagggcccggcgctgcggcgctcctattggcgccacctgaggcgtctggtgctgggtcctcccgaaccgccgttctcgcacgtgtgccaagtcggggacccggtgctgcgcggcgtggcggccccggtggagcgggcgcagctaggcgggcccgagctgcagcggctgacgcaacggctggtccaggtgatgcggcggcggcgctgcgtgggcctaagcgcgccgcagctgggggtgccgcggcaggtgctggcgctggagctccccgaggcgctgtgtcgggagtgcccgccccgccagcgcgcgctccgccaaatggagcccttccccctgcgcgtgttcgtgaaccccagcctgcgagtgcttgacagccgcctggtcacctttcccgagggctgcgagagcgtcgccggcttcctggcctgcgtgccccgcttccaggcggtgcagatctcaggtgcgggcggcggggaccggggctgctggagcagcgcgcgcgtctcttctgcccgactccgcgagagcgcagaagtggtcgcggttcatacgccggacctcccgcaggagcgaagtgggatgcgggagcggagaggcctcaggacggatagaagctcctgtggggtagagcccgctcagataggacgcaggggcgaggagaggtcccctagttccgctgttacctgacagcctggcgtctgctttctgctcccttgctctctgaggcaaacacgctcttcggccccagttagatccgccacggtggagttggagaagtgggggttagcccccgccagcctgacccagcccagggggctaggccattcccccgtggtaccacaggatgcctcgcggaatgcgggctctgctggggtcggggtgattgt

SEQ ID NO: 1868 - protein, 1068 aa, Homo sapiens
MKEARGTQDPSPLGPCCLPGPASPHIVHPVVVQTETVGAIGPVHQQLKILPNAEGKKRTGDRARTNRSPAPRPHSTLATTPTHSRVRPARSYYFAIFSNMTRVSSSVKGRIFPPGLEHRILVPCSESAPLVVRKGSDVVAGKMATAATIPSVATATAAALGEVEDEGLLASLFRDRFPEAQWRERPDVGRYLRELSGSGLERLRREPERLAEERAQLLQQTRDLAFANYKTFIRGAECTERIHRLFGDVEASLGRLLDRLPSFQQSCRNFVKEAEEISSNRRMNSLTLNRHTEILEILEIPQLMDTCVRNSYYEEALELAAYVRRLERKYSSIPVIQGIVNEVRQSMQLMLSQLIQQLRTNIQLPACLRVIGYLRRMDVFTEAELRVKFLQARDAWLRSILTAIPNDDPYFHITKTIEASRVHLFDIITQYRAIFSDEDPLLPPAMGEHTVNESAIFHGWVLQKVSQFLQVLETDLYRGIGGHLDSLLGQCMYFGLSFSRVGADFRGQLAPVFQRVAISTFQKAIQETVEKFQEEMNSYMLISAPAILGTSNMPAAVPATQPGTLQPPMVLLDFPPLACFLNNILVAFNDLRLCCPVALAQDVTGALEDALAKVTKIILAFHRAEEAAFSSGEQELFVQFCTVFLEDLVPYLNRCLQVLFPPAQIAQTLGHVNIGAIQEPLAFILPKRETLFTLDDQALGPELTAPAPEPPAEEPRLEPAGPACPEGGRAETQAEPPSVRGGFGRREGAPGRRAEGGGAHCQSKQEGGDPVAASLCAGRRRFPACPALRPEGAGRVTVKGAAMARLWGALSLWPLWAAVPWGGAAAVGVRACSSTAAPDGVEGPALRRSYWRHLRRLVLGPPEPPFSHVCQVGDPVLRGVAAPVERAQLGGPELQRLTQRLVQVMRRRRCVGLSAPQLGVPRQVLALELPEALCRECPPRQRALRQMEPFPLRVFVNPSLRVLDSRLVTFPEGCESVAGFLACVPRFQAVQISGAGGGDRGCWSSARVSSARLRESAEVVAVHTPDLPQERSGMRERRGLRTDRSSCGVEPAQIGRRGEERSPSSAVT

SEQ ID NO: 1869 - DNA, 859 bp, Homo sapiens
  source (1)..(859)
  CDS (201)..(659)
ccacccagcaaagggaccaactcggggagggtggcggaatataaaaataggagcagtggcagaagacacttgcgtgcactcccaaatcccaacacaggagggcagccgttccttactgttcctcacaggggacccccgtggaggacaggcaaaaagtttagacggcggtcgcaggttgaacgaagctcccgaggggtttcatgatatatatacataaccttgggtggggaccaactcccttggccagggccaggcgtgggagagtgaaaagtgggctgcgagtgcagggggccgtgagtgcggaagccgcgggtgcaggaacctcgggtgccggctttgcaggacagggaagggtgtggcgtgaaaaccacaattgcgatctcccgtggggaaagcttataactgtggcaagttccgattacagactggctggaattcagctcgccgctgccagtggaagctgtggtagtagatctgcctcactgagtgcatgggaattgggggctcaccgctgcctgctactccccactctgcacaaactcttctgcgcagcgggggcagaagaacatcaacccagtggcctgagacccactccatcccccaacattcacaggagctgctgcttgccctgcacacggagaatcagagcacaaacctgaccgacgcagcccccatctcgctttgccccgccacttgccctggtagcttaacacaaaggacagaatctcttgagagctctgtggccctgactattgcctgtgaaaccagagtattcctccctccacgcccccaccaccacgcccctccccccccccccccccacacacccacctaccgcagccggggttcatttgcaagc

SEQ ID NO: 1870 - protein, 152 aa, Homo sapiens [sequence omitted]

SEQ ID NO: 1871 - DNA, 913 bp, Homo sapiens
  source (1)..(913)
  CDS (201)..(713)
tggtcgcgaactcctgacctcgtgatctgcctgcatcggcctcccaaagtgctgggattaccagtgtgagccaccccgcccagccccttttattaactatacttgatcagtataatgcataatttcccagaactgaaaaactctcaaactcaagctctcataattgagggaaaggttcataaagagaaatcagctaaagaatgattattatatcattagaatgtgaaggcattttttttttaaaaaaaagctctataaaaaaaatctgtatctcaaatcaggattttatttataaacattctagaccttatgccttctattattcttttaagatcaaactttccaaaaaaataacctttccactttctgattctgctcccatactctccattcacagcttaatccatgacaaccttacattgcattcacttttcaatcattgcaacctggattctgcttccactcaatcactagctcagctcttcaagatcaccaattatctcattgttactaaatccaatgtccacttttgggtccttgataacttggccgcatttaatatagttgatcagacttccttggaacgcttttacaccttggcttccttctacctatctggctactctttctcaggtttctttactaatttcttttctaccattaaattcctcagaattcttttactctctttccctttaggtgatcttacataacattctctaagataaactacaggcctacaactccagcctagatctttcttccagatctcaaacttactcccagacagacaataacctgggtttacttgcatagatgagagaatactctcagaaaggctgacctagatttctatttattaggctaaaacctaatcaactgtattatactttctctggaaatagactaaaca

SEQ ID NO: 1872 - protein, 170 aa, Homo sapiens [sequence omitted]

SEQ ID NO: 1873 - DNA, 1541 bp, Homo sapiens; identical to SEQ ID NO: 1073
  source (1)..(1541)
  CDS (201)..(1071)
  CDS (1172)..(1341)

SEQ ID NO: 1874 - protein, 346 aa, Homo sapiens
MVIMSSHPKTYQQRFVFPYFDLWGNVVIDKSYLENLPSDSPIVTMAFPTLQAILAQGIQENNFAESLVMTTTVSHNVTMPFKISMTFKNNSPSGGETTCVFWNFRLSNNTGGWDSSGCYVEEGDGDNVTCICDHLTSFSILMSPDSPNPGSLLGILLDIISYVGVGFSIFSLAACLVVETVVWKSVTKNQTSYMHHTCIVNIAASLLVANTWFIVVAAIQDNHYVLCKTACVAATFFIHFFYLSIFFWMLTLGLMLFYRLLFILHETSRSTQKAIAFCLGYGCPTGHLCHPMIIVVVNITITIVVITKILRPSIGDKPCKQEKSSLFQISKSTGVLTPLWGPHLGF

SEQ ID NO: 1875 - DNA, 976 bp, Homo sapiens
  source (1)..(976)
  CDS (201)..(776)
aaaaaaaaaaaaccctgctgggatattgatttgattggggtacagacaactttctatattgattggaattgtacagtcagacaacttatgattgacatattaacaatattgagtctttcaatccatgagtacgggatatctttttttttttttttttgagacagagtttttttgtgtcacccaggctggggggcaggggtatgatctcagctcactgcaacctccacctaccaggttcaagtgattttcctgccttggcttcccaggtagctaggactacaggcgtgcaccgccacacctggctaatgtcttgcatttttagtagagatggggttttcaccatattggcatgctggtctcgaactcctgaccttgtgatctgcccacctcagcctcccaaagtgctggaattacaggtaagtatagtgtatctttccatttatttccaaatttctctcagcactattttttatgtttcaggatatagaacttgcacagttttcttgagttcatttttatttcatattcttttttattattttattttaagttccagggtacatgtgcaggatgtgcaggtttgttacataggtaaacatgtgccatggtggtttgctgcactgataaacccatcacctacgtattttacccagtatgcattagctgtttttcctgatgctctccacatctccgccctcccccaacaagccccagtgtgtttggtttccctcactgtgtccatgtgttctcactgttcagctcccacttataagtgagaacatgcagtgtttggttttctgttcctgcatagtttgctgaggataatggcttccagcttcatccacgtccctgcaaaggacattatctcgttcctttttatggctgcatagtattccatgatgtatatgtaccacattttctttatccagtctatcatcgatgggcatttgggttgattccatgtctttgctattgt

SEQ ID NO: 1876 - protein, 191 aa, Homo sapiens [sequence omitted]

SEQ ID NO: 1877 - DNA, 874 bp, Homo sapiens
  source (1)..(874)
  CDS (201)..(674)
aatatgtacagtcctgggccacacgcacaagattctgtcttagcaggtcagagttagagatggggagctacctggttacgagggatcccagtgcattttgaggcagctggttgttaagactgcattgtaaaaattacaacccaaagatgtgaaccgaaacagaaagacattggcaggctagaaaacaacacaagtaaaacatgaacaagttcattccagaaggagattctcaaccacagctgcacatcagaatcacctggggagattttaaaacccccaatgcccgggctctgcagcccagatcaattattaaagaatctcttggggatgaaacatgggcatcagtatttttggtttgtgtgtgtgtgtgtggtttttttttttttttttttttgagatggaatcttgttctgtcacccaggctgaagtgcagtggtgcgatctcagctcactgctacctctgcctcccgggttcaacccattttcctacctcagcctcccaagtagctgggatcacaggtgtgcaccgccacgcctggctaatttttgtatttttaatagagatagggtttcaccatgctgcccaggcaggtctcgaactcccagcctcaggtgatctgcccaccttggcctcacacagtgctgggattacaggcatgagccattgctcctagcagtatttttttaatgaggcaaaattcacataacatacaagtccctgtatgaaaccatacacttcagtatcattaaatacattcacaatattaagcaatcatcatctctgtctagttccaaaacattttcattaacacccccgcccccccaaaaaataaccctgtatccatcaagcattctccatcccctcccctttccc

SEQ ID NO: 1878 - protein, 157 aa, Homo sapiens [sequence omitted]

SEQ ID NO: 1879 - DNA, 949 bp, Homo sapiens
  source (1)..(949)
  CDS (201)..(749)
  modified_base (1)..(40): a, t, c, g, unknown or other
nnnnnnnnnnnnnnnnnnnnnnnnnnnnnnnnnnnnnnnntccagctttgtcctttctgcttagaaatgccttggctatttgggttcctttttggttccatatgaattttaaaatactttttctaattataggaaaaatgtattgatagtttaataggaataaaattgaatctataaatttggagagtatacccatttttatgatattgagtcttactatctatgaacatggaatgttttttgcatcatctctgatttctttgagcagtgttttgtggttttccttgtacagatctttcaccttcctggtcagctgtcttcttaggtattttattctttttgtggcaatcatgaatgggactgcattcctgatttggctctcagcttggctgttgtttgtgtacaggaatgctagtaatttttgcacattgattttatttcctgggactttgttgaagttgtttattagcttaagaagcttttgggctaaaactgttgggttttctagatataggaccatgttgtctgcaaacagggatagtttgacttactcttttcccgtttggatgccctttatttctttctctttcctaattcctctggctaggacttccaatgctattttgaataggagtggggagacagggcatccttgtcttgtgctggttttcaaggggaatgcttccaggtttttcccattcagtgttatgttggctgtgggttttcatagatggctcttattattttgaagtatgttcattcaatacttagtttattgagagtttttaacatgaagggatattaaattttatcaaaagccttttctgcgtcttttgagataatcatgtggtttttgtctttagttctgattatttggcaaatcacatttattgatttgtgtatgttgaaccaaccttgcatcccagtgataaagcctacctgattgagg

SEQ ID NO: 1880 - protein, 182 aa, Homo sapiens [sequence omitted]

SEQ ID NO: 1881 - DNA, 1168 bp, Homo sapiens
  source (1)..(1168)
  CDS (201)..(968)
gtgctctttaaaggttacgcattcaactctcaaaagcctcttaagagaagagtgactttaagtatttctaagggcagagcaatgggaggtggagaatgctgggttgcaggtgacactataaacgtagctcatgcctcctatttccatgcaggacctcccagccctgaagacaaacatcagtgacagacatcagtggcagaatggcctcccggtatgtggcagtgggaatgatcttcttatcacagaccgtggtgggagtcctggggagcttctctcttcttctccattatctctccctttactgcactgggtacaggttaaggtccacagatttgattgttaagcacctgattgtagccaacttcttagctctccgctgtaaaggagtcccccagacaatggcagcttttggggttagatattttcttaatgctcttgggtgcaaacttgttttctatctccatagagtgggcaggggagtgtccattggcaccacctgcctcttgagtgtcttccaggtgatcacggtcagctccaggaaatccaggtgggcaaaacttaaagagaaagcccccaagcatgttggcttttctgttctcctgtgctggatcgtgtgcatgttggtaaacatcatctttcccatgtatgtgactggcaaatggaactacacaaacatcacagtgaacgaggatttgggatactgttctgggggaggcaacaacaaaatcgcacagacactgcgtgcaatgttgttatcattccctgatgtgttgtgtctggggctcatgctctgggtcagcagctccatggtttgcatcctgcacaggcacaagcagcgggtccagcacattgataggagcgatctctcccccagagcctccccagagaacagagctacgcagagcatcctcatcctggtgagcacctttgtgtcttcttacactctctcctgccttttccaagtttgatggctcttttggataatcccaatagtttactggtgaacacttcagccttaatgagtgtatgtttcccaactctcagtccctttgttctcatgagctgtgaccccagtgtatacaggctttgctttgcttggaaaagatgacaagatcccctaaactgatcataaacatgtgaaaacatgtaagttgtatatatttgctca

SEQ ID NO: 1882 - protein, 255 aa, Homo sapiens [sequence omitted]

SEQ ID NO: 1883 - DNA, 1588 bp, Homo sapiens
  source (1)..(1588)
  CDS (201)..(1388)
ttccatcttgtacacctggctctgccttctagatagcagtagcaaaattagtgaaagtactaaaagtctctgatatgcaaaaataatggcataagctgtctctctctctccctctctctctctctgccttggctgccaggcagggaagggccccctgtccagtggacacgtgacccatgtgaccttacctatcattggagatgactcacactctttaccctaccccttttgctttgtatccaataaatatcagcgcagcctggcatttggggccactaccagtctcctgctttgtatccaataaatatcagcgcagcctggcattcggggccactaccggtctccgcgtcttggtggtagtggtcccccagacacagctgtcttttctttcatctctttgtcttgtgtctttatttctacactctcttgtctctgcacacggagagaaacccaccaaacctgtggggctggaccctacactattccaggtagttgttggaatcctggggaatttttcactcttatattattatatgttcctttactttaggggatacaagccaagatccacagatttgattctcaggcacctgactgtagctgactccttggttatcctatctaaaagaatcccagagaccatggcaacttttgggttgaaacattttgacaattattttggatgcaaatttcttttgtatgcacacagggtaggcaggggtgtgtccattggaagcacctgcctcttgagtgtcttccaggtgatcaccatcaaccctaggaactccaggtgggcagagatgaaagtaaaagccccgacatacattggtctctccaatatcctgtgctgggccttccacatgctggtaaatgccatttttcctatttatacaactggcaaatggagcaacaacaacatcacaaagaaaggagatttgggatattgttctgccccacttagtgatgaagtcacaaagtcagtatatgcagcattgacatccttccatgatgttttgtgtctggggctcatgctctgggccagcagctccatcgttttggtcttgtacaggcacaaacagcaggtacaacacatctgtaggaacaatctctaccccaactcttctcctgggaacagagccatccaaagcatccttgcattggtgagcacctttgcattatgttacgccctttccttcatcacctacgtttatttagctctcttcgataattccagttggtggctagtgaacactgctgcactaatcattgcctgttttccaactattagcccttttgttctcatgtgccgtgaccccagcagatccaggctctgcagtatctgctgcagaagaaatagacgattctttcatgatttcaggaaaatgtgaattggctgtcttggtttatgttcggccactgatgcactcagacctcaagggatcttaagaatgattatcagccaatttcactgcagagagaggggtgaataagacagagacttatccaatgtgaaatactaaataataatagccatagtaaatgaaatcttatgtaattaacatgtgagtacttatatagttgtattttt

SEQ ID NO: 1884 - protein, 395 aa, Homo sapiens
MTHTLYPTPFALYPINISAAWHLGPLPVSCFVSNKYQRSLAFGATTGLRVLVVVVPQTQLSFLSSLCLVSLFLHSLVSAHGEKPTKPVGLDPTLFQVVVGILGNFSLLYYYMFLYFRGYKPRSTDLILRHLTVADSLVILSKRIPETMATFGLKHFDNYFGCKFLLYAHRVGRGVSIGSTCLLSVFQVITINPRNSRWAEMKVKAPTYIGLSNILCWAFHMLVNAIFPIYTTGKWSNNNITKKGDLGYCSAPLSDEVTKSVYAALTSFHDVLCLGLMLWASSSIVLVLYRHKQQVQHICRNNLYPNSSPGNRAIQSILALVSTFALCYALSFITYVYLALFDNSSWWLVNTAALIIACFPTISPFVLMCRDPSRSRLCSICCRRNRRFFHDFRKM

SEQ ID NO: 1885 - DNA, 1201 bp, Homo sapiens
  source (1)..(1201)
  CDS (201)..(1001)
gtgctctttaaaggttacgcattcaactctcaaaagcctcttaagagaagagtgactttaagtatttctaagggcagagcaatgggaggtggagaatgctgggttgcaggtgacactataaacgtagctcatgcctcctatttccatgcaggacctcccagccctgaagacaaacatcagtgacagacatcagtggcagaatggcctcccggtatgtggcagtgggaatgatcttatcacagaccgtggtgggagtcctggggagcttctctgttcttctccattatctctccttttactgcactgggtgcaggttaaggtccacagatttgattgttaagcacctgattgtagccaacttcttagctctccgctgtaaaggagtcccccagacaatggcagcttttggggttagatattttctcaatgctcttgggtgcaaacttgttttctatctccatagagtgggcaggggagtgtccattggcaccacctgcctcttgagtgtcttccaggtgatcacggtcagctccaggaaatccaggtgggcaaaacttaaagagaaagcccccaagcatgttggcttttctgttctcctgtgctggatcgtgtgcatgttggtaaacatcatctttcccatgtatgtgactggcaaatggaactacacaaacatcacagtgaacgaggatttgggatactgttctgggggaggcaacaacaaaatcgcacagacactgcgtgcaatgttgttatcattccctgatgtgttgtgtctggggctcatgctctgggtcagcagctccatggtttgcatactgcacaggcacaagcagcgggtccagcacattgataggagcgatctctcccccagagcctccccagagaacagagctacgcagagcatcttcatcctggtgagcaccttgtgtcttcttacactctctcctgccttttccaagtttgtatggctcttttggataatcccaatagtttactggtgaacacttcagccttaatgagtgtatgtttcccaactctcagcccctttgttctcatgagctgtgaccccagtgtatacaggttttgttttgcctggaaaagatgacaagatctcctaacctcatcataaacatgtacattgtatatatttgctcatggttcaattgatgacttactcttctgtgccgcaatgtaatcttaa

SEQ ID NO: 1886 - protein, 266 aa, Homo sapiens
MASRYVAVGMILSQTVVGVLGSFSVLLHYLSFYCTGCRLRSTDLIVKHLIVANFLALRCKGVPQTMAAFGVRYFLNALGCKLVFYLHRVGRGVSIGTTCLLSVFQVITVSSRKSRWAKLKEKAPKHVGFSVLLCWIVCMLVNIIFPMYVTGKWNYTNITVNEDLGYCSGGGNNKIAQTLRAMLLSFPDVLCLGLMLWVSSSMVCILHRHKQRVQHIDRSDLSPRASPENRATQSIFILVSTLCLLTLSPAFSKFVWLFWIIPIVYW

SEQ ID NO: 1887 - DNA, 1027 bp, Homo sapiens
  source (1)..(1027)
  CDS (201)..(827)
gagaaaatactatttttttccataaaaccataagggtgtgggcagtgtaaacctaaaattatgcacgagagcttccccatcgctctgtgtgggtagagaaacactccagcgtgtctgctctcttggtgctgggaatctgtgagaattcctgagcccgacacacagcgtctcggcttttctcatcagatgcagaccagtgcatgcatagtccagctgggcagcacagaaacagcgagaggccactggctcccaaaccaaagctgggcccttctggctttggaggaccctctggggatggctgtggtcagcacagctctttccttctctgctctcacagctgtggtgccggtggtctttgtgaagcacggagactcccccagtcaaggccaacggctggactcagctgcgtcatctccctcaccccgagcttcctctgctccttactcttcactggccgtcccaacacggccacctgccccccagcaaaccacatgagtcgtgtgcactgtagctgcgtccacagacttgccctcatccctcactgtggtcctggctttcaaggccattgcacctgggaggagactgaggtgttggctggtgtcagggcctctgcatctttcccatttgctcctgatccaagtgactctgtctgcggggtctggctgggaacctctcccccatccactgccagaggctcacattctgagcccagatacatcctggtagtctgcgtcctgggatacctgagctccttggccctgggaagcttcagtgtgactttcttggccaggaacctgtctgacacctgcgtggagccaagtccctgacgttgagcgagagttctgcagtgtctgggtcaccttccttcccatccgccaagggcaggtctcctccatcttggcccctagggtggggatcccaggctgcatctttgccccccgccctccccgcccagtgctacattaccctcaccgtaggctcaggcctgataggaacatcctgcaagggccggggaataagatactta

SEQ ID NO: 1888 - protein, 208 aa, Homo sapiens [sequence omitted]

SEQ ID NO: 1889 - DNA, 1141 bp, Homo sapiens
  source (1)..(1141)
  CDS (201)..(941)
ggaggaacaggctctgactttggattccgcttccctggaaagggcgttgatttgttcagcgttctgcacggttcaggtcaccccgggggcagtggagagggcagcctgggcctccctgtgacttgacagcacagagaggtccatcctggggtcaggagctctgcccatgcccctggcgtcttcccctgcagtgcagaccaatggggcaagttgcgagtgtggactgtactcctccctccttgcagactgagctcctccctccctggggaccgcgctcctccctccctgcggactgtgctccctgtctggggactgcgctcctccctccttggggaccgtgctcctccctccctccctgcggaccgcgctcctccctccctggggaccgcgctcctccctccctgcggaccgcgctcggccctccctggggaccgcgcccctccctcccagcggaccgcgctcctccctccctggggacctcgctcctccctccctccctgcggactgtgctgctccctccctgcggactgtgcttctccctcccttggagcagcctggacttgccagagctctgccaggtggggcctggccgccctttcccaggccctgcagtggccttgtcctttctcacctgtttccactcctgctgtccccgttgggccctgggcttcgtcctcttgctcaagccctttgttctgaacctgcgtggcagccgggactgggggatccccagcaaagagctctggcttggggctcagaaagagggtcatcgggtcctcgtgggatgcccgggctctgggccacctcccctccctccgcccagcctccctgcctccatctccgtccagggcagccccgggccctgctccccactgctaagtgtgtctgctgagcgctggcccccattgagtcctgagggctggggccgggggccgggttagtgaggtcagcgtcttgtccgagaggtccctgtgacagcccgggatgagccacgggtggagggcagtggggccttgcccaggggaggaccccactcttcctgcagggacctcccctgcgccggctcccagtccctggcactgcgcccacccagggctgtcagcctccaccttcagaggccggcccgggaaacccttccaaa

SEQ ID NO: 1890 - protein, 246 aa, Homo sapiens
MGQVASVDCTPPSLQTELLPPWGPRSSLPADCAPCLGTALLPPWGPCSSLPPCGPRSSLPGDRAPPSLRTALGPPWGPRPSLPADRAPPSLGTSLLPPSLRTVLLPPCGLCFSLPWSSLDLPELCQVGPGRPFPGPAVALSFLTCFHSCCPRWALGFVLLLKPFVLNLRGSRDWGIPSKELWLGAQKEGHRVLVGCPGSGPPPLPPPSLPASISVQGSPGPCSPLLSVSAERWPPLSPEGWGRGPG

SEQ ID NO: 1891 - DNA, 1198 bp, Homo sapiens
  source (1)..(1198)
  CDS (201)..(998)
ggccgccaccgccgtgtccccaggcagctgcgtgcccagcctgtacgtgcgcaagcagcgggcgctggaggccgagctggacgcacggcacctcgcgcaggcgctggagcacctggagaagcagggcccgccggcagccgaggccgccactaagaagccgctgccgcccctgcgacacctggacggcctggcccaagactatgcttccgattcgggctgctttgacgacgacgatgcaccgtcatccctggctgcggccgcggccaccggggagccagccagccctgccgcgctgtccctcttcctgggcagccccttcctgcaggggcaggcgctggctcgcaccccgcccacccgccgaggcggcaaggaggcagagaaggacaccagtggggaggcagccgtggcggccaaggccaaggccaagctggcgcttgcagtggcgcgcatcgaccagctggtggaggacatctccgccctgcacacctcgtccgacgatagcttcagcctcagctctggagacccgggacaggaggcgccacgggagggccgcgcccagtcctgctcgccatgccgcggcccggagggcgggcggcgagaggcaggaagccgggcgcacccgctgctgcggctcaaggcggcccacgccagcctctccaacgacagcctcaacagcggcagtgccagcgacgggtactgcccacgcgaacatatgctgccctgcccgctggccgcactggcttcgcgccgcgaggaccccaggtgtgggcagcctcggcccagccggcttgaccttgacctgcccggctgccaggccgagcccccggcccgcgaggccacctccgccgacgcccgcgtgcgcaccatcaagctgtcgcctacctatcagcacgtgccactgcttgagggtgcctcaagggcgggtgcagagcccctcgcggggcctggaatctctccaggggcccggaagcaggcctggctgccggcagaccacctgagcaaggttcccgagaagctggcggctgccccgctgtctgtggccagcaaggcactgcagaaactggcggcgcaagaggggccactctcgctgtcccgatgcagctccctttcctcgctgtcctcggccggccgcccaggccccagcgagggtggtgacctggatgacagtgactcctccctggaggggctggaggaggcc

SEQ ID NO: 1892 - protein, 265 aa, Homo sapiens
MLPIRAALTTTMHRHPWLRPRPPGSQPALPRCPSSWAAPSCRGRRWLAPRPPAEAARRQRRTPVGRQPWRPRPRPSWRLQWRASTSWWRTSPPCTPRPTIASASALETRDRRRHGRAAPSPARHAAARRAGGERQEAGRTRCCGSRRPTPASPTTASTAAVPATGTAHANICCPARWPHWLRAARTPGVGSLGPAGLTLTCPAARPSPRPARPPPPTPACAPSSCRLPISTCHCLRVPQGRVQSPSRGLESLQGPGSRPGCRQTT

SEQ ID NO: 1893 - DNA, 892 bp, Homo sapiens
  source (1)..(892)
  CDS (201)..(692)
cgaactcctggggtcaagtgatcctcccacctcagcctcccaaagtgctgggattacagatgtgagccactgcactcagcctgaaaagtcttcacaaagaataaagttgggaagaatttggtgagcagttctcaaaacataccacaaagcagcaatcatcaaacaatgtgttatgggaacaaggactcacaaagcagtcaatgaaatgtgagaccccagaacacactgttcttttttttttttttccaagacagagtctcgctttgtcacccaggctgaagtgcagtggcacaatcctggctcactgcaacctccgcctcccaggttcaaacgattatcctgcctcagcctccccagtagctggggttacaggcgctcgccaccacgcccggctaatttttgtggtttttcttttttcttcttttttgaggcggagtctcagtctgtcacccaggttggagtgtggtggcgtgatcttggctcactgcaacctccgcctcccgggttcaagcaattctcctgcctcagcctcccaagtagctgggattacaggtgcccaccgccacaccaggctaattttttgtatttttagtagagacggggtttcaccatgttgtccaggctggtctcaaattcctgacctcgtgatccgcctgactcggcctcccaaagtgctgggattacaggcgtgagccaccacacccacccagattgttctacttctagacctcgctacaatgctgacagttccatgatagagtgaataaagatacgttaggctgggcgcggtggctcacacctggaatcccagcactttgggaggccgaggtgggtggatcacctgagctcaggagttcaccatcaccctgggcaacatgacggaaatactgtc

SEQ ID NO: 1894 - protein, 163 aa, Homo sapiens [sequence omitted]

SEQ ID NO: 1895 - DNA, 1084 bp, Homo sapiens
  source (1)..(1084)
  CDS (201)..(884)
ccagtctcatgtaggcaccatcatctcccacctggactggtggcgtaccctcctcactggcctgcctctcaacttcctgcaatctattcaccccacagctagagagatgtttaaaacacaaataagatcatatcactcctgctcaaaatcctcctattaggatatgtaataacagcaaacatttacatagcacttactatatgtttggcattctggcaaatgtgttatatatatgcagtttatttatttttattttattttattttttgagtcggagtctcgctctgtcgcccaggctggagtgtaatggaatgatctcagatcactgcaacctccgcctcctaggatcaagcgattctcctgcctcagcctcccaagtagctgggattacaggcgcccaccgccacacccagctggtttttgtatttttagtagagatggggtttcaccatgttggccaggctggtctcaaactcctgacctctggtgatctgcccacctcagcttcccgaagtgctgggattacaggcgtgagccaccacatccagcctatatatgcagtttatttaaataaaaatacaaaactctctactgttttccacaaggtcctgcaccattcagcccccataacctctctctcctctgttcactggactttgatgaagtctctttgctgttactcaaacaggccacctcagggcctttgcacttgctgttccctcttcttggaatgcccttctctttgttcttttgcaagtcacccctgcttatccttcaggtccccattaaaatgtcacctttggccaggtgcagtgcttcatgcgtgtaattccagtatttttcagaggctaaggcaggatgatgacttgagcccaggaatttaagaccagcctgggcaacatagggagaaccctctctaccaaaaaaaaaaaaaaaaaaaaaagaaaattgaaaattagttgggcatggtggtatgtgactgtggtcccagctacttgagaggctgaggcaggaggatcgtttgagcccaagagtttgaggctgcagtgagctgtgatggcaccactgcaatctagcctgggtg

SEQ ID NO: 1896 - protein, 227 aa, Homo sapiens [sequence omitted]

SEQ ID NO: 1897 - DNA, 886 bp, Homo sapiens
  source (1)..(886)
  CDS (201)..(686)
tgatcaagctcttgcaggctttcccctctcaccttaggctagctcactcatacccatcaccccagcgtctccgcagagcctaggtggtaccgcctttaagcccatatgagggcctttgaacatctaccccagctcttcctgggccatcttgttctggtctctgctcccctgctgtcatcacagagaggccctcactgatcatgcacatgagcagctctcactctcagctccaggcactgtctgtgtcacctccttgcttacttcctgcagtcctgccttctgtcttgctcaccttgcacactgtctgcaggtggttgaatagagtgctggaggcctgccttcttggctttgcagggcttggatttgcaaactggtcccctggagcaccttccagggaggtctcctcctacctctctccctgcagtagccaagaggggagcaaagtctccctccacagatgcatctgcctagcacttaggtgccaggcgtactcactctacctggattgggggcaccaaccccggagcctgccttcttccatgcccccatgtggtgtcttgtactcctctccctccctgtccctccctaccccaggtgcagccctgcccttgtgtaaatgtctcctccagttacaagggccaggcaggtaccatacagttttcaatgcacccaatattgagggataaatcacaaccagtcctcagcttcgtgttctagaagacaatgggagctgggagcaaccacggagaagctgcagaactcaggccctgtctaaaccggggtctccacatcactcctcatggttgctgcctaggagtgcagctgttatggtctgacaatctgattgtctgtgtggtgtgtgcatgtgtgtgtgtgtaacctccaa

SEQ ID NO: 1898 - protein, 161 aa, Homo sapiens [sequence omitted]

SEQ ID NO: 1899 - DNA, 938 bp, Homo sapiens
  source (1)..(938)
  CDS (202)..(738)
  modified_base (96)..(195): a, t, c, g, unknown or other
  modified_base (845)..(938): a, t, c, g, unknown or other
tggtctttaaacgacaagcccacgggaattaaccacgggacgtgcaattagaaccgaaaggtctggccccggaggtggagatacgccagttgctcnnnnnnnnnnnnnnnnnnnnnnnnnnnnnnnnnnnnnnnnnnnnnnnnnnnnnnnnnnnnnnnnnnnnnnnnnnnnnnnnnnnnnnnnnnnnnnnnnnnnataagcggaaaccttttcggcaaacatctgacgagtggcatcgatacgcgtctggaaatcagcacgcacatctttcggaagcttttcgtaagggttgccgtcgaccttgcgatcgccgctgtaaatcagcgtgacctcaacgccgttagttttgagcgcagcgccatagttactgtgcgccatcatgaccccaatggagccggttctggccgtttgtgtgaccagccgtcgcgatgccgaactggcaataagctgacctgcactgcagttcatgtcattggccagcgcccagatgggtttgatatcgcgcatacgggcaataatgtcggcgcagtcaaacgccccggacaccattccacccggcgtatccatatccagaagaatgccgtcaacgccggggtcactgattgcctgctgcaggcgagcaatgatcccgttgtaacccgtcatcccggaataaggctgaagcgcacgggttttactgaccagcgtgccggaaaccggcaagaccgcgataccatttgccacctgatagctgcgtgatggacggggatccatgtcatcatcctcaccaaacagcgccagcggttcggctatttgtccggcatcaagcgtgatgccagagacggtatctgtcagccgggtgatgnnnnnnnnnnnnnnnnnnnnnnnnnnnnnnnnnnnnnnnnnnnnnnnnnnnnnnnnnnnnnnnnnnnnnnnnnnnnnnnnnnnnnnnnnnnnnn

SEQ ID NO: 1900 - protein, 178 aa, Homo sapiens
GNLFGKHLTSGIDTRLEISTHIFRKLFVRVAVDLAIAAVNQRDLNAVSFERSAIVTVRHHDPNGAGSGRLCDQPSRCRTGNKLTCTAVHVIGQRPDGFDIAHTGNNVGAVKRPGHHSTRRIHIQKNAVNAGVTDCLLQASNDPVVTRHPGIRLKRTGFTDQRAGNRQDRDTICHLIAA

SEQ ID NO: 1901 - DNA, 865 bp, Homo sapiens
  source (1)..(865)
  CDS (201)..(665)
aattaaccgggtctggtgacacatgcctgtaatcccagctactcaggaggctgaggtaggagaactgcttgaactcaggaggcgggggctgcaatgagctgagatcaagccactgcactccagcctatgggatagagtgagattccatctcaaaaaaaaaaaaaaaaaaaaaaaagtttaaaaaaccctacccctgccaaatgcttttccgaagtagccgtgccattggtgtttccaactttgcctggcaccttccatcgtttgctaagttccagcaggtgtatttcatttgcatttccctcatgaataatggtgttgagcagcttgccatggtgcctttgctgcctgtgacctctttggtgaaacatccggaggtgtcttctgcccacgtggaggcgcagcctgggctctgccgcccacctttcacccgaggagcctgcagcacgtggagagcatcagggtgtgctttctttacagtttggggcttttttgagacagggtctcgctctgtcacccaggctgcagtgcagtggtgccatcacggctcaccgccagccttgaccttcacctcagcctcccaagtagctgagactacaggcatgcaccgccatggctggctcttttttaatttgtctttttctaaagacagggtctcactgtcttgattaagctggtcttggaactcctgggcttcaagggaccctctcagctcggcctcccaaagtgctgggattgcaggtgtgagccatcatgcaagtctggggttgttttttttttgctaaacaggatgaatagaaatctcttttgggggatctcttagtccaaatcctttagctgaatgcgcgtgtcccggtgaggctgctcc

SEQ ID NO: 1902 - protein, 154 aa, Homo sapiens
MLFRSSRAIGVSNFAWHLPSFAKFQQVYFICISLMNNGVEQLAMVPLLPVTSLVKHPEVSSAHVEAQPGLCRPPFTRGACSTWRASGCAFFTVWGFFETGSRSVTQAAVQWCHHGSPPALTFTSASQVAETTGMHRHGWLFFNLSFSKDRVSLS

SEQ ID NO: 1903 - DNA, 898 bp, Homo sapiens
  source (1)..(898)
  CDS (201)..(698)
aaatacttcccccaaagtctgttttctttcttcttctacagagtttaatttgcgagtctttgatatacaccatgccctggataaactatttccagctctggaacaattcctgtctggaggccgagcatgtgggcagaaacctcagatgagggctcatatgattgagttgtgcactggctgttattaaactgtaaaggatcatgtctccctcattggggtcttattacacatgcacacacacacatgcacacacagagtgtacacgtacacacacttgcacatacttaccttcacaacccacacacacaatgctcatactcacgacaccctcacactctcaccactcacatacatgcacattcactttaacagcctcacacactcatccacccgcccacccactcactcctacatgtcaagcacatgcacactcactcgcacacacattcagtggtcttcaggggttggtgcaatcttttctttcttttcctttctttctttcttttttttttttttttttgagacacagtcttgctctgttgcccaggctggagagaagtggcgcaatcactgaagcctccgctaaagtggagctcactgaagccttgacttccccgggctcaagtgattctttcaccttagcctcccaagtagctgagattacaggtgcacaccgctttgtccagctaattttttaaaacactttttttgtggagacaatatctccctttcttgcctaggctggtcatggactcctgggctcaagtaatcctcctgcctcagtctcccaaagtgttgggattataggcgtgagctaccgcacccacccagctgatgcaattagaacagaatgttcataatcattggggaaacctcatcattctttctacgccacccc

SEQ ID NO: 1904 - protein, 165 aa, Homo sapiens [sequence omitted]

SEQ ID NO: 1905 - DNA, 871 bp, Homo sapiens
  source (1)..(871)
  CDS (201)..(671)
ggtccttgaaagaaattataaaatattgaatgttaaattgcaagatccatgtgctgctcacaactttgacttaagattccaccccctttttaaaaaatgagacccattttttcactagtaaaattattagctacttaaagtgaaagataccatcaaaaaagtacctgctacttgattccatttatacaaaattctagaaaatgcaaattatagtgacagacagtaaatcagtgatggcctttgaaaaaagggcagggaggaatgggttacaaaagggcacaaagaaacttcaggtgatgatacaaatgtttatcatcttaattatggaggtggtttcgcagatgtgctcatatgtcccaactgatctaattttacattttttttttgttttttattttttgacactgagtatcactctgtcgcccaggcaggagtgcagtggcacaatctcggctcactgcaacctcctcctcccggtttcaagtgattctcctgcacctgtagctgggattacaggtgcccaccgccacacctggctaatttttatatttttagtagagatgggtttttaccatgttggccaggctgttctcaaactcctaacctcaggtgatctacctgcctcagcctcccaaagtactggcattacagggatgagccaccgtgcctagcctaattgtacattttaaatgcatataatttattgtatgtcaaatatacctcaaaaaagctgtttcagattgttagctagaaaataatgtaaacaaaaaaccctaataagtggctatagtcatttaaacactaaatgaaaaatcatctctccatagctttatcgtagatagactaacattataaaactgtcctagctgac

SEQ ID NO: 1906 - protein, 156 aa, Homo sapiens [sequence omitted]

SEQ ID NO: 1907 - DNA, 1066 bp, Homo sapiens
  source (1)..(1066)
  CDS (201)..(866)
caccatggcctgtctcccaatcaactctccactcttgccctttgctatgcagtctcactgcctcccagtatgcacatgcagtctcactgcctcccagtatgcacatgcatgcacacatgcagacacacacagacaaaggcacataaacacatgcacacaggcagacacatgcaggcaaacacacacacacacatccacacatgcaaacatgcaggcaaacgtacacacacacgcatccacacatgcaaacatgcaggcaaacgcacacacacatgcagacacacgcaggcaaatgtgcacacacacatgcacacatgcaaacatatgcatgcaaacacgcacacacatgcacacatacaaacgcacacacatgcatgcacacgtgcaaacataccacacacatgcatgcacacatgcaagcaaacgcacacatatccacacatgcaaacacacaggcaaatgcacacacacatgcaaacacatgcaggcaaacgcgtgcacacacacacatgcacaaatgcaaacacatgcaggcaaatgcacacacgtgcatgcaaacatgcaggcaaacacacacatgcatgcaaacatgcaaacatgcaggcaaacgcacacacgtgcatgctcacatgcaaacacatgcacacaaacacacacacccatgctcagaatcaccagcagatgcttttttcttttttttttttcgacaagagtttcactctgtcgccaggctggagtgcagtggcttgatctcagctcactgcaacctccgcttccaaggttcaagcaattctcctgcttcagcctcccaagtagctggaactacaggtacgcatcgccatgcccagctaatttttgtgttttgagtagagacaggttttcaccatgttggccaggatggtcttgatctcttgacctcgtgatctgcccgctttggcctcccaaagtgctagggttacaggtgtgagctaccgcgcctggccgcagatgctcattttgtttgtttgtttggggtagggttttgctctgccacccaggctggagtgcagtggtgggatcacagctc

SEQ ID NO: 1908 - protein, 221 aa, Homo sapiens
MQTCRQTYTHTHPHMQTCRQTHTHMQTHAGKCAHTHAHMQTYACKHAHTCTHTNAHTCMHTCKHTTHMHAHMQANAHISTHANTQANAHTHANTCRQTRAHTHMHKCKHMQANAHTCMQTCRQTHTCMQTCKHAGKRTHVHAHMQTHAHKHTHPCSESPADAFFFFFFRQEFHSVARLECSGLISAHCNLRFQGSSNSPASASQVAGTTGTHRHAQLIFVF

SEQ ID NO: 1909 - DNA, 23579 bp, Homo sapiens
  source (1)..(23579)
  CDS (201)..(292)
  CDS (7942)..(8265)
  CDS (23298)..(23379)
ccaccacgcttggctaaatttatttttattttattttctatgtttttatagacggggtctcacttattgtccaggttggtctcaaactcttgagctaaagtgatctgcctgcctcggcctcccaaagtgctgggtttacattacaggcgtgagccaccgcgcccggcctaagtggtttctctttgaacttaaaatgaaacatgaactttcttttggcctttgagatttggcccttgcttgcctctccgacccctgttaacttcgctgccccgctgtgcaccgaacgcagcaggtgagttcctgctgcaggaacccagcaggagctgtcttggacactgctgccacagcttgctgcttcttttcctgggaaggaaatagccactggtttttgtaccttcgatacaggtagccactggtcatctgtggctactgagtacgtgaaatgtgtctagtgcaacctagaaactgaattttcaaatttaattttaattaatttaaatttaaaatgtaaaactgaagcaatataaaaatattcttcctcttaaacacaactttttagttagaactacattttatgcttgtcaaaactgagcattggaatgagatgtgctgtaaactatgcaccagatttcaaagatttagcacaacaaaaataaattatttcaataactttttaaattaatcacatattgaaatgttaacattttgaatacactaggttaaataaaatattacaattaattgcaccttttttttttttaaatatggttatcaactgggtgtggtggctcatgcctgtaatcccagcactttgggaggcctaggcaggcggatcacctgaggtcgggagtttgggaccagcccgaccgacatggagaaacccgtctctactaaaaatacaaaaattagcccagcatggtggcacatctgtaatcccagctactcccgggaggctgaggcaggagaattgtttgaaccggggaggtggaggttgctgtgagtggagattgcgccattgcactccagcctgggcaacaagagcaaaactctgtctcaaaaaaaataaataaataaagtggccataagcaaatttaaaattatgtagctcacatcacagttcttttttttttttttttttttttttgagagccagtttcactcttgtcgccctcccaaagtgctgagattacagatgtgagccaccgcgcctggcctcacattgtatttctattggacgctgctgctctaggttactgagtttttcactctatttaaatgctacttccttacagaggccttcccagaccactcttcccttcagtctcattaccgtgctgtaatttctttgcactctttaacatctgaatttatttacctatttattgatttacttgctgttcacctgttttctccacaagaatgtaaactccatgagaccaaggataagatatatctttcttattcactgctatgttcccagtgcttagcatataaatatatttgtcagttatatatttttatctgtcaataatctcatcttgcttgttcactttacagccaacaaaataggcctagaaaagagcagggactttcaagatcacacagtgccagatcctacctcctaatacctaatccagtgctccttgctttggttacagttgatatgataaactgaggcacactaagacaggaataaggtgtgcatttcagcaatgcctcagtccagtatttcccaaagtgggaacctgtgttaatggtggtatgattttaggtggtacgtgaatgttaaatgatcctgaattatacaataaaaaaggattcttttttcaatctttttcaacttgaaagggtcagtttggtgctaacgtgtccttagtgcctttctaacactttataatctgccttttttgtttgtttgtttgtttgtttttgagatggagtcttgctgtgtcacccaggctggagtgtagtggtgccatctcggctcactgcaaccttcatctcccgggttccagtgattctcctgcctcagtctcccaggtagctgggattacaggcgtgcaccaccacgcccagctaatttttgtatttttagtagagacggggtttcaccatgttggctaggctggtctctaactcttaacctcaggtgatctgcctgcctcagcctcctgaagtgctgggattacagttatgagccaccgtgcctggcctaatctgccttttattttttgttttattttatattatttttgagacggagtctcgctctgtcacccaggctggagtgtagtggcacggtctcggctcactgtactctgcctcccgggttcacgccattctcctgcctcagcctcccaagtagctgggactacaggcgcccgccaccacctccggctaatttttgtatttttagtagagacggggtttctccgtgttagccaggatggtcttgatctcctgaccttgtggtccacccacctcagcctcccaaagtgctgggattataggcgtgagccaccgtgcctggccattatgccttttaacacagagatttaggcctcaaatttagagcctttggtaggcaataccatccattcacccagaatttactaacaatgttttaacttccccccctccgcttttgtttttttttgagacagtcttgctctgtcgcccaggctagggtgcagtggtgtgatcttggctcactgcaacctctgccttccaggttcaagtgattctcctgcctcagtctcctgagtagctgggattacaggcgtgcagcaccatacccagctaatttttgtatttttagtagagatggggtttcaccatgttggtcagactggtcttaaattcctgacctaaggtgatccaccctccttggcctcccaaagtgctgggattacaggtgtgagccactgtgcccggccaactttacttatttttatagttaccttctatttatggtaagtgatactagttttctatcataattatatacagttgacccttgaacaatgcaggggttaggggcacaaactctttacacacagtcaaaaatcctttttttctttgagacagggtcttattctgttgcccaggctggagtgcagtggtatgatcacaagtcactgtagcctcgatatcccaggctcaagcgattctcctacttcagcctcctgagtatctgggactacaggagcacaccaccacacccagttaattttttaaattttttgtagagatgaggtttcatcatgttgctcaggctggtcttgaattcctggactcaagtgatctgccaacctcaacctcccaaagtgctgggattataggtgtgagccaccgtgcctggccctcatattatttttgactcctcaaaaacttaactactaatagcctactgttggccagaaggaagccttactgataacataaactgtggattaacatctttttatgttatatgtattatatactgtactcttataatcaagtaaactggctgggcatggtggctaatgcaggtaatcccagcagtttaggagacagaagcagcggattgcctgaactcaggagtttgagaccagcccgggcaacaccgcaaaacctcatctctactgaaaatacaaaaatctgccaggcatggtggtgcacacccgtagtcctagctgcttgtggggctgaggcaggaggatcacttgagcctgggaggttgaggctgcaatgagccgagatggtgccactgcactccagcctgagtgacagagtgacaccccatttctaaaaaaaaaaaaaaaaaaaaaaatgaagtaaactagggaaaataaaatattaagaaaattattggataagtagagatcgattataagaaaatataaggaagtgaaaatacatttacagtactgtactgtatttattgataccgtaagtttacttcatctgtttacaagatgtattgtctgtctgaaatagtaagcaaccaaagcttcagacctcaacctatagtatcaatcaagtaattcaagcaactttttcttgtaatgtcatgactcttctttgcttcttgggaacacttccagaatcactagtagcacctagtatgggtcccttggtactactcaaggtttacaatattgcattaaacacattgaaaaatacacgagaaccttgagggatcacattttactgcaatatgtgatttcctggtgagactccttgtgcagagatgattagctcacagagcgttgtaagcacgtactcgcaacacctgagcatgccgcaatggcaacaggaggtatcttcacaattatgatggtagtacagtatgtactgcagttgtttacacagttatgatttagtactacatctttacatttggttattttctttctattttgaatggtatgtactgtctgtgtgtacatatgttttgggaaattttaattttttataatagatttatgtatattgtatgatagcaagtgataaaatagactagtatctacatatattttatgcattaatgacatacttttttttcattttttaaatatttctaggtaacaagattcacctgttttttctaattgtcaatcttcaaaaatattttccaatttaaaaagtcagctgggcaaggtggctcacccctgtaatcccagcactttggtaggctgaggcaggtggatcacctgaggtcaggagttcgagaccagcctgacaaacttggcgaaaccccatctctactaaaaatacaaaaacattagctgggcatggtggcatgtgcctgtaattccagctactcgggaggctgaggcatgagaatcgcttgaactcgccaggtgaaggttgcagtgagccaagatcacgccaccgaactctggcctgggcaacgagagcgaaaactccatctcaaaaaaaaagaaaaaaaaaaaaagacataaaataaccaatgtataagtggacccatgagttcaaacacatgtgttcaagagtcaactgcattttttaagttttaattttttgttgttgttgttttgagacagagtttcactcttgtcaccaggctggagtgcaatggctcaagctcactgcaacctccacctcccgggtacaagcaattctcctgcctcagcctcccaagtagctgggattacaggcgcccaccaccacgcctggctaatttttgtatttttagtagagacggggtttcaccatgttggccaggctagtctcgaactcctgacctcaggtgattcacccaccttggcctcccaaagtgctgggattataggcgtgagccaccgcatccggcctaagatttaattttaaacaaatatgttaaataaataggtggaactcagatatggcaaagttataaatgtggttctgaaatgactgaggtttgggaaacaccacattcatccaaaagtatgagtgatggtgaaatttcaggcaggggctaactagtagaggaagctgcttttcgtaacctattttgctcagtggacttcagctccctgggcttctgtgggtgtctggctcagagctcaagccaggaagtctttagtagctttcagtttcttttgttaatataggcctgaaaaatctttcatttagttcctagccagaggttgggggtcctccttctttaagtccagtctcaccccaacaatgagaactcccagaacttccctgcccttaccttagaagatcttttcttttctgctgcttttctgccgatctgtttggatttcttgttcagcgcttcaaagagagacaaaaggagcaaagtcagatgtttctggggacgttgagctgcagtgaagtgagaggggcagagggggcttgggaagtcacaaggtcagggagaggagaagaagcgtgctggatgagtcacactgtaggactcaagccagtaggttcttgttagcccggctactgacctggagccaggcactgatagcaacgtgtcctctgagggaaggcaaatgggaaatccaagcaggcactgggatctgcctgtgacactcttgtggggcctggtccctcgacctaagtgagcttgggccactcagagccaccccaggtgccccttccttcatctccattgtggcaggcacaggaacattgtgatacccagaaaatggactcctgtcttgtacacagatgcacctgtgtttcctattttccattcctgagagctctggagccaggaggacctgatttgaatcctgactctgccaatataatgactatgtggctgtgggtaacttacttatcctccatgagactcagttttttcatctgcaaaaaaggttccataatatctgccttgcagtattgtcttgaggataaatgaagtctgtttataaagtgaaaagtctgttacactgaagatcaataaatgttgatgttcctcccttccctgtctgatatgtgtagaatatcctctttctttcttcttcttcttttttttttcttttgagacagagtctcactctgttgcccaggctggagtacagtggtgcgatctcggctcactgtgacttctgcctcctgggttcaagtgattttcctgtctcagcctcccaagtagctgggattacaggcatgtaccaccacacctggctaatttttgtatttttagtagagatggggttttgccatgttggccaggctggtctcaaactcttgacctcaggtgatctgcccaccttggcctcccaaagcgctgggattagaggtgtgagccaccgcgcctggccgattatttatttattaaaaaatttcttttttgagtcagggtctgtctgtcacccaggctggagtgcaatggtgtgatcatagctcactgcagcgtcgacctcctgggctcaagcaatcctcctgcctcagcctcccaaatagctggaaccataggcatgcaccaccattcccggctagtttttgtttgtttgtttttgagacaggatctcactctgtcactcaggctggagtgcagtggcacaatcatggctcattgtaggctcaaactcctgggctcaagtgatcctcctgcctcagcctcccaagtagctaggactacaggcgcatgctaccatgcctggttaatttttgtatttttaatagggacggggtttcaccctgttgaccaggctggtcttgaacacctgagctcaagagatctgcccgcctcagcctacgaaagtgctgggattacaggtgcatgccacgtgccttgctagtttttaaatttttctgtagagacggggtctccctatgtcgctcagtctggtcttgaactcctaggctcaaacaatcctcatgcctccagcttcccaaagtgctgggattacaggtgtgagccacctcacccagcctcaaatatcctcgtttcctagcaaaagccgaggtagtaagagatattagttttgagcttaggttctggagttaagtacctgattttgaattctggctttgccagttaaaaactgtgtgatccgtgctagttacttaattctcctaagcctcaagttcctcaactgtgaaatatgaataaagaccatactcacctcacagtgcctaccacacagtatgtctatgattattatcaggtgaagtcaaaccagatctccaatgccaggctccagtgcccctcatattttcccctgagccttcattcccaaccctgacatgacaggactggtccatcccagacttgcatatgttctggagcatttcctgaagtttgttactgttgacaggagttctgtgattcattaagtttcagaaatgctaaattaaacaaagttcaccaagtgtcttaacttcaggcctttcagagcctctaccatatgctaagctgcttattagactggtggcatgcagagctttcccaaaccaaatgagtcaagggccaccttattctcccaggattatttcctggaacgagcaagaaggagccgtgaccatggcggtggatcctggtagcaccctgggaagcatgcttgatctcctgcagcccctctcctgggccagagcccagaggctaggtgacttacccacaatagagacagaagggacatccagtaggttcacagaggagttgcttctcaggctcctgtcatctcggagcttctcctcaggtggcaggtggctgttggcagtgaagaagcagaggaagaccagcagggtggccaggagtaagcgggtgacatccatcccaggaggcctgagtgggacagagaaggtggtcaggtgggtgggtcaggggtaatggtaagaggccttcctgctttctttgtgcttctttgggctggtgttgtgaccctgttaggcaagtgtcctggtggagctggaggattagcaaggcttaggatggggaaggggaattgatgagggaagaagagagaagagagatgggaagaggaagagagaaagacaaggaacagaaggagattggagcaaagagaaaaagcaatgcattgcactggtctctgctgtccagagggtggtgtgttggctgcttctgtgtgtttttttaatgtctgtggccccaggagaccccaggcctgggcagagttgttgaaaggcccccagtagggcctcacagtagcagagattttattaagatgtacagaataaggctaataaattaagtctcagtgagaaagatgaagaggtaagtggccccttcagacaagcatatatgttggctcatatcctagattcccaaacccagagagaacgaatgcaggtatagtttgtgtcaggaggatggagctgttgacataggccccctggatttatgtatttatttatttgctagctggatttttttttttttagatggagtctctctcttgttgcccaggctagagtgcagtggcataatctcggctcactgcaacctccacctcccaggtacaagtgattctcctgcctcagtctcctgccccagtagctagggctacaggtgcccatcactatgccaggctaatttttgtattttttgtagagacaggattttaccacattggccagactaagcattttatattttctaactctttttattttttttgagacagagtcttgctctgtcagctaggctggagtgcagtggcacgatcttggctcactgcaacctcctcctcccaggttcaagagattctcgtgcctcagcctccagagtagctgggattacaggtgcccaccaccacacctggctaatttttgtatttttagtaaagacgggatttcaccatgttggccaggctggtctcgaactcttgtcctcaagtgatccgccagccactgccactgcacctggcctatattttctaactcaagctcatatagtttttttctgttgtcattgtttgttttgagacagagtctcactgtcacccaggctggagtgcagtggcacaatcttgggccactgcagtctcaacctcccaggctcaagccatcctcccacctcatcctcctgagtagctggcactacaggcatgtgcaaacacacctggctaatttaaaaaaaaatttttttttgtagggatgaaggctcactctattacccaggttggtcttgaactcctgggctcaagtgatcctcccacctaagcctcccaaagtgagccaccactcagccatatttgttcatttgtgtgtatgtgtgtatatatatatacactatatatataatactatatatatagtattatatatatcatatattatatatacactatatatataatactatatatagtattatatatatcatatattatatatacactatatatatactatatatattatatatatcatatattatatatagtatatatatactatatatattttataatatatataatatatatatatagtatgtatatatatatatatatggcatcccccttctaagatattaactcctcaatgacaggggctctccaccatgatttccagctttatattttctcacaggaagtaataaattccatccaagcttggctacttcctggtccccatatgatgcttgtcctttcccactgatcgcagtgcttagcttgctatacaaacatttatttacttatcatttgttaatggtcatcaaagcccaaatgagtgactacagtacttatttgcccttctcacatttcatatggcatttatccagtctggagataagaatggtttttacatttttaaatgattctattaaaaaaaaaaaaagaatatccaacggagaccctatgtgttccacaaagcataaaatatttattatctggccttttacagaaaaagtttgccaactccgtctagattgtaagaatcatgatggattggaataagaacatcatgtttgctccatcaatatctactaaccgatggagcacttaactatttcttttctttctttctctctttttttttttaagatggaatctcactctgttgcccaggatggagtgcagtggtgcgatcttggcttactgcaacctctgcctcccggattcaagcaattctcctgcctcagcctcctgagtagctgggactacaggtgcttgccaccacgcccagctaatttttgtattttttgtagagacaaggtttcaccatgttggccaagctgatctcaaactcctgacctcaagtgatctgcctgccttggcttcccaaagtgctggggttacaggtgtgagccaccgcacccagcccaactatttcttcaggaaaagatattgatgacctttattaaaaggctaatgtgccaataatatttctcattaatttatcagacttcagatttgttttagtacaggactgggtcctaatgagacaagagctaggactggtaaacttggattgtggaggcagaggaaaaattacatcatgaatagttatcataatgttttgaaacttattattatatcatgctgtctagaattcataaagattcaatacagtaacatttggaatagaaatatgaaatatttgtaaactagataatattttagttacataaaattaaatatatatttaaaatttttattctgtatcattgatctcttccaaaagcaatattgtttttaatttttagcttctgattgttgctaaaaagaccatttttcaaataacagcatctagctttaatgggtattaattaggaaggcaaattagaaataaattcaacccggctgggctggtggctcacgcctataatcccagcactttgggaggctgaagcgaatggatcacttggggtcaggagttcgacctggccaacatggtgaaaccccgtttctactaaaaatacaaaaattaaccaggtggtggcctcctgagtagatgcctataaatccacctactcaggaggctgaggcaggagaatcgcctgaacccagggggaggaagttgcagtgagctgagatcgtaccacttcactccagcctgggtgaaagagggaaactgtctcaaaaaacaaaaaacaaaaaacaaaaaaaaaaaagagaaagaaagagagagagaaagaaagaaaaagaaagaaagaaattcaactttaaaaaacaaggaaagtaaaggatggagatgtggtggaatgtggtgggaagctctgattaacaaaaggctcttagcagggagtggcggcacaagactgtgttcccagctactcgggtggctgaggtgggagaatcacctgaccccaggaagttgaggctacagtgagctgtgattgtaccactgcactgttacccagcctgggcaacacagtgagactctatctcaaaaacaaaaacaaatgagctcgattaaggcaagttacaagaggcatgttataaattaggaggcggtacgtgtagttattttgtgtctttgggttttccttaccataaataatatactcatgggccaaaaactgtaatgggaatttctacaaagaagtgagagtggccggaaaatctgagctagaaaaagaggccaggcatggtggctcacgcctataatcccagcactggaggaagccacaggaggaggattccttgatcttaggaatttgagaccagcctggcaacatagagagacctcatctctacaaaaaatttttaaaaaattagccgggtgttatcgggtccagccctactgggtctgtgggttttttctcctcatgtgtggagacgagagatcgtagaaataaagacacaagacaaagagacagaataaaatacagctgggtccgggggaccactaccaccaaggcacagagaccagtaatggccccgaatgcctggctgtgctgttatttattggatacaagacaagggggcagggtaaggagtgtgagccatctccagtgatagataaggttacacaagtcacgtgtccaccagacaggaggcccttccctgtttggcagccgaggcggagagagaggacagtttatgccattatttcttctatgcatttcaaagactttagtacttttactaattctgctaccactctctagaaggcggagccaggtgtacggggtggaacatgaaagcggaccaggagcgtgaccgctgaagcacagcatcacagggagatggtcaggcctctggaggctgcgggtgggcctgactgatgtcaggccttccacaagaggtggtggagcagagtcttctctaactcccccggggaaagggagactccctttctcggtctgctaagtaaccggtgccttcccgagcactgatgctaccactagaccaaggtccactaggtaatgggtgccttcccaggtgctggcattactgctagaccaggaagccctctagtggccctgtccgggcgtaacagagggctcacactcttgtcttctggtcacttgctcaccgtgtcccttcagctcctatctctgtatggcctggtttttcctaggttataattgtagaacaaagattattataatattggaataaagagtaatgctacaaactaatgattaatgatattcatatataatcacatctataatctatttctagtataactattcttattctatatattttctttattatactggagcagcttgtgccctcggtctcttgccttggcacctgcgtggcttgccacccacaggtgtgatagtacacacctgtggtcccagcctcttgggagggtgaggtgggagggaggattgcttgaacctgggaggttgaggctccagtgagctgtgatcataccaaaaaagaaaagaaaggaagaaagaaaaaggtggcaggagtttggggaagattaagttagacccaggaacaggattgagaacgagggggctgaatcaacagtccagttcaatattcacaaatccaaggggtagtgggacagctcatgaccagaggccaatatccatgggactggatgtccatggactggccaaagtccacagtgatcacttgctctgaacacttcataatgtaggtacaagctcagttcaccatcagagcagccataagcctaatgtaaacactattcactgcacaatgggtaggcaggagatctcaccaggtcaaatccccagcctaactcaggaaaagtgaatcctaggggttagtttaagacaaacagaccaacccccggcaaaacagttctcctggtagaaccatacagttggactgagtcttggattggtaaagtctcagtggagtaaatcttatttgggtataatagggagaaagttaaagaccagtattccttacctcaattctggagggatatgtatattctaaatgtaatacaggtccataatgtttagttgtattaggattcttggggtcagatgttttttagaattcagaactttgtgaacgttagaaaaatagtatcatccatatattatgttaaaccacatataaggggtctgggagaaccctataatgaaaatattaatgcttctatagcaaaaaggcatggatcttcataataggcaggatgaatacagactatgaattgattcacatcaattcgggacgggttttgttgccaaatgtcttcaggtaagttcagattttgctgccaaatgagttgccaaagggggaacaaaaccttatacttttcagggtgttgggattttgcaattacaggtaaacgtttttggatctgtacagaccttgttgctgttattactcattagagaaacacactccctgctattaatacaggacaataatgctaggccgggccctgtggctcacgcctataatcccagcactttgggaggccaaggcaggtggatcacctgaggtcaggagttcgagaccagcctgaccaacatggtgatagctcgtctctactaaaaatacaaaaattagctgggtgtggtggcgcatgcctgtaatcccaactacttgggaggctgaggtagaagcatcacttgaatccaggaggcagaggttgcagtgagcaaagattgtgccactgcactgcaggctgggtgacagagtaagactctgtctcaaaaaaaaaacgaaacaaaacaaaacaaaaaaacaggacaataatgctgacagcaatgagtagctgtgtaactgggtttctcaactgtctttccactctgcaatgatgaagactgttatttgatgtgtgatatctctgatgacagttctccttttaaattcatcatctgtatttaggacttaagatgagtttctcttcagcatggtggataaaaagaaggatccagacacacgagtcagatcacttggatgaacctgtcatttaaatggctgcctgaccctaggtccacctaggtctcagctttctcagttttaagggcccggcactcacgcctataagcccagcactttgggaagctgaggtgggtgcatcacttgaggccaggagtttgagaccagcatggccaacatggtgaaacccgtctctactaaaaatacaaaaattagccaggcttggtggtgcatgcctataatcccagctacttgggaggctgaagcagaagaatcgcttgaaccgggaggcggaggttgcagtgagctgagattgtgccattgcactccggcctgggcaacggagcaagactctgtctctaaaaaataaataaataaataaataaataaataaataaataaaataaaataaaaataagagcgtagggaaaagaaagagagatcaggctgggcgcggtggctcacgcccgtaatcccagcactttgggaggctgaggcaggcggatcatgaggtcaggagatcaagaccatcctggctaacatggtgaaaccccgtctctactaaaaatacaaaaaaattaggcgggcgtggtggcagacacctgtagtcccagctactcgggaggctgaggcaggagaatggtgtgaacccaagaggcagagcttgcagtgagctgagtgagccactgcactccagcctgggcaacagagcgagacttcgtctaaaaaaaaaataaaaaaaaaagaaagagagatcaggttgttactgtgtctatgtagaaaaggaagacataaaaaactccattttgatctgtactaagaaaaattgtttctgctttgagatgctgttaacctgtaactttagtcccaaccctgtgctcacagaaacatgtgctgtattgaatcaaagtttaatggatttagggctgtgcaggatgtgccttgttaacatgtttgcaggcagtatgcctggtaaaagtcatcgccattctccattctcgattaaccagggacacaatgcactggacacaatgtccgcagggacctctgcccaagaaagcctgggtattgtccaaggtttccccccactgagacagcctgagatatggcctcgtgggaaaggaaagaccttaccatcccccaacccgacacccataaagggtctgtgctgagggggagtagtgaaagagggaggcctctttgcagttgagataagaggaaggcatctgtctcctgctcctccctgggaatggaatgtctcagtgtacagccgaccattcccattcattttattctaagataggagaaaataggagaaaaccgccctgtggctagaggggagatatactgacaacaatactgctctgttactctttgctacactgagatgtttgggtaaagaaaaacataaatctagcctacgtgcacatccaggcacagtacctttccttgaacttactcatgatactaattcctttgctcacatgtttccctgctgaccttctccccacctgttgccctgctacactcccctcactaaaatagtaaaaataataatcaataaatactgagggaactcagagactggcaccagtgcgggtcctctgtatactgagcaccggtctcctgggcccactgttctttctctatactttgtctctgtgtcttatttcttttctcagtctctcgtcccacctgatgagaaatacccacaggtgtggaggggcaggcccccttcataagaggataggactatatgactcactatagagtctgaggcacagagtggaaacttgacaaaaatttgttatatgaatgaaagaatctaccttctatccttaattctatgaatcctgtcttagtctgtttaggtgactataacaaaatatcatagactgggtggtttctaaacaacggaaatttatttctcatggttctggaggctgggaagtccaagatcaaggtgcaggcagattcgatatctagtgagggcctatttcttcatagacagccatcatctctctaatctcacaaggtggaagggctttcccttgggcctcttttgtaaaggcactagtctcattcatgagggctctgccaccatgacctagtcacctccaaaaggccccacctccttacactataaccttggcagtgaggatttcaacatctgaatctgagagggcataaacattcagaacatagcaaattcctcatttccaattcttgcctccctgtcattgtgccactgggcagcttaaatagttacacagagaaggtcaggcgcggtggctcatgcctgtaatcccagcactttgggaggccgaggcggacggatcacgaggtcaggagatcaagaccatcctggctaacacggtaaaaccccgtctctattaaaaaatacaaaaaaaaatcagccgggcgtggtggcgggcacctgtagtcccagctacctgggaggctgaggcaggagaatggtgtgaaccggggaggtggaggttgcagtgagccgacatcacgccactgcactccagcctgggcgacggagcgagactctgtctcaaaaaaaaaaaaagttacacagagaaagatttataagggtcacttattatgtttccttaagagctgaagaatttacaaatgcataagtgtgactgaatctgactaagttgtggaaaagagggcatggaaagtcatggaaagtttgtacaagcccactgcaattgtattaatagcagtgagtgtgttcctcatgagtagtaacagcaatgagggtttgtacaggtccagtgcaattggttgatgtaacccaggagtcttgttgacgtgcgtgcacacatgtatgctaatgtgcaagatctctgcttgagggaatataagagacaacagtgttgagatcatccctgagtagggtacactcagcgtcctgagtgtgcactgaaggcatccccttagcgacagcactggggagagtattgtatcttaatccttcagggataaggccttgttccccacagcaaaggaaaggactacagtctcccagtcatgtggcatggctaagtacctactgagacagaggtgtagtgagagatgagaatggaagaagaggcaaaggcacctccacctcccgggttcaagcgattctcccatctcagcctcctgagtagctgggattacaggcatgcaccactacgcccggctaattttgtacttttagtagagatcgggtttcaccatgttgaccaggctggtctcaaactcctgatctcaggtgatccgcccgcctcagcctcccaaagtgctgggattacaggtgtgagccaccgtgctcggcctttttaatttttttgagatgtgatctcactgtgttgcccaggctggcctgaaactcctggacttaggtgatcctcctgcctcagccactcaagtagctgggactataggggcaccactgcacctggctccccttttaatttttattttagcattgttttagtattttttgtttgtttgtttaagtagtcttcttgaagacagtgaacagtgtcagctgctgaccatactaggtgttcatgaggcacaactctgacagcctgccctgggctttgctagtggcactagtcaaggcagccagagtgtctgggtagccagcaagctggcattggaggggaggtgactgggctcagttagtcataatagtggcttccaccagccctgccaagcaccaatggccagagacctgggggttcttggtaaagctcatccctgtgaaggacagtgaacacagatcaagaagtatcagctggaccccagcatggaggagcaactgcagacttcagcagactcattcaggttagttaagatgaaggcaggctttcctttgatcaggcttttggaaaaaagcatatacttgggaagaaagggaaatgatagagcaagagggaattcttgaccttgaaattgtctgtgaaacactgtgcatatgtgatttttcaggggagagggtccatagctttctctgggtccataatgggttctctggccctgaaaaactgaatcaagttgctttatgttctgcatatgtgaataacggatgccctacctttaaatggctttcagtgcagggaagagagacaagtaactaacaaaaggaggagggggaagtgttagagttgaggcacaatttgccaggccctgtgaaaaatgaaatgtaggaccccttgttaaaaaattaagagatggtgacaggagagcattaaaccaagccattggccctttaagcacgaggcctggtgcagctacacaagctgcatgctcatgaagccagctgtggttacaagattgagaaagttgacactgatcatatgacacagtggttatgaagaagtttgcggattaggggaaacattacattacactcagtaaagtttcagcagtaagtcatataataatgagactgcttatagacatcaccttcagctgtctaaccagggctctgggcatcggatatctcagtggaggcgaggagataggggattgggggcgggggatgggaatgcgtttggggagtcaaagaatgaaccagcatgtaaaaacctgggttctggtcccagccctgccactagctccctgtgtgacttctggcaagttactttctctctatggataactttttcttcacctgtatgagaaaaaatttgcattattagatttttttttttcgagacagggtctcactctgtcacccaggctggagtgcagtggtgccatctcagctcattgtaacctctgccttcagggttcaagcaattctcccacctcagcctccctagtagctgggactacaggcatgtgccaccacacctggctaattttttttttttttttgtatttttggtagagatggggttttaccatgttgcccaggctgatgaattattagatttttaagttctcttcgaacgttgaattgctgttattccaaatgagtggcatccccttcagagaggctacaacatattctgctgaatatttctttctttctgtttttatagatagggccttgctctgtcacccaggctggaaggcaatggcaagaccatagctcactgcagccttgacctcctgggctcaagcaatcctcccacatcagcctcccaaggagctgagactacaggtgtgagccaccacaccaggccaattatttttttagtagaggtgaggtctcacaatgttgcccaggctggtctcaaactcctgggctcaagagacactgcctcctcggcctcccaaagtgctggaattacaagcgtgagccatcgtgcctgacctgaatatttcttttatggtgaggatttgccctctgagaataaatctgacctctgaaaatagacaatgatttccagctaactctggtaagaataataatgtttttgactgaaaatgagctgtggcctaagtaatgggatttttataacttaaaagtggttttagtttttagctaatataaccagaattgagacagtcagtagaatgtttttccccaaagttgtaatattgagatgtcataagttcattctaatgctgcaagtagcttaaaatatctttgaattctagacataccttcagaggcaatttttttttttttagatggagtcttgctctgtcaccaggctggagtgcagtggtgcgatcttggctcactgcaaccttcacctcccgggttcaagcgattcttctgcctcagcctcctgagtagctgggattacaggcgcccatcaccatgccaggctaatttttctatttttagtagcgacagtgtttcaccatgttggccaggctggtctcgaactcttgatctcaggcgatctgccctccttggccttccaaagtgctgggattacacgcatgtgccactgcgcccggccttcaggggcaatttaaaagtcatacaagacagggcaccatggctcatgcctgtaatcccagcactttggcaggtggagtcaggaagattgcttgagaccaggagtttgagaccagcctgggcaacacggcaagacctcatctccacaaaaatttaaaaaattagctgggcatggtagtttcagctatcttgggaggctgaggcaggaggatcacttgagtctaggagatcaaggctgcagtgagctgtgtttgtgccactgcattccagtttggggaacagaatgagaccatgtctcaaaaaaaaaagtcatataagaaaaagcatcagcagggtacagtgactcatgcctgtagtcctagcactttgggaggctgaggtgggtggatcacgaggtcaggagttcaagacagcctgactaacatgatgaaacctcgtctctacaaaaatacaaaaattagctgggcgtggtggcatgtgcctgtaatcccagctactcgggaggctgaggcaggagaatcgcttgaacccgggaggcggaggttgcagtgagccgagatcacaccattgcactccagcctgggcaacagaaggagactctgtctcaaaaaaaaaaaaaaaaaagcatcatataatgtaataatcatagctttcgtaataagatggaaacctgtttcaattgaggaccatgtgaggcaaatatcaatttaaatcagtcttttctaaaaatagctatttaggagagaggcatatacaatgttaaacacaacgggctacattggctcatgcctgtagtcccagctacttgaaagcatgaggcaggtggatcacctaagcctgggaggttgaggctgtggtgagccatgatcatgccactgcactccagcctgggtgatagagtgagaccctgtctaaaacaaaaaacaaaaaacaaaaaaacaaaaaccaacaacaatgacaactaaaacaaaaaaaactaaaaacataaaatgttaaactcactaggtttttaaattaaagagaggagtataaaacaggcagaaaaggaaaggagagaggagaaaagtacagaggaaaagaaataaatagaagagttgtgggaattggagttaatcagtaaagggagcttcaagtttatctgcaattttaaaaaatataaaagatgaaggcccggcacaggggctcacgcctgtaatcccagcactttgggaggctgaggtgggcagatcacttgaggtcaggagttcaagaccagcctgggcaacatggcgaaaccccatctctaccaaaaatacaaaaaattagtcaggcatggtggcatgtgcctgtggtcctaggaggctgaggtgggaggattgcttgagcccggaggcagaggttgcagtgagctgagatttctgaatccagtggggctgattgcaaaggagacccaaggaacagtgccaagttagatgccaattacccacttcgagtcctttattgtggagtctgttcattaccaacagagtactgtgaatatatgcctgatgttgctcattgtaaacaatggttagagaagaattttctaaatgaacttgcaaaatttactgtagaaaattcacccaaacaagaagctggaattagtgagggtcaaggaacagcaggggaagaagaggagaagaaaaaacagaagagaggtggaagaggccaaataaaacaaaaaaagaagaccataccacaaaagcttactaaggccaaaattcctagagcaaagaagaaacatgtgacaagagtgtgtggccttgcaacttttgaaattgatcttaaagaagcacaaagatttttgctcaaaaattctcctgtgctgcctcagtaatggggaggatgaaattattcggggagactttacagatgacataattcatgtcattcagaaaaatggccagaagtagatgatgacagcatcaaagatcttggagaagtaaagaagtgaatttgaaaatttgtctgtatttaatggcctgaactgagagttgatatggccaaagggagagaggcctttatatatacatatatatatatttactgtagaatatatatatattctacagtaaaactgtagactgccctcgtccttggcattttcactgttttgtacaaggttgcttgtttttttaattgccaaagtcaaataaacagggagactgtcatgctcatgcatgaatagaatttagtcaaataaaaaattttggtcatttgctgggcgtggtggctcacgcctgtaatcccagcactttgggaggccaaggcgggtggatcatgaggtcaggagttcgagaccagcctggccaatatggtgaaaccccgtctctaccaaaaaaaatacaaaatttagccaggcatggtggcgcacacctgtagtcccagctactcaggaggctgaggcctgagaatcgctggaacctgggaggcggaggttgcagtgagccgagatctgccattgcactccaacctgggtgacagagtgagactctgtctaaaaaaataaaataaaatttggtcatttggtactgactttctctttgtctctctctctttttttttttttttttgagacagagtctcacactgtcgcccaggctcgagtgcaatggcatgatctcagctcactgccacctccgcctcccaggttcaagcgattctcctgcctcagtctcctgagtagctgggattacaggcgcctgccaccacgcccagctaatttttgtatttttagtagcgacggggtttcatcatgtttgccaggctggtctcgaactcctgacctcgtgatttgcccaccttggcctcccaaagtgctgggattacaggcatgagccactgtgcccggcctgactctctctttgtctttttattttttg

SEQ ID NO: 1910 - protein, 165 aa, Homo sapiens [sequence omitted]

SEQ ID NO: 1911 - DNA, 931 bp, Homo sapiens
  source (1)..(931)
  CDS (201)..(731)
tcctcccgtatcagtctcccaagtagctgggactacaggcatgcgccaccatacccagctaatttttaaattttttgtagagacagagttttgccatgttacccaggctggtgtcaaactcctgggctcaagcaatctgcccacttcagcctcccaaagtgctaggattacaggtgtgagccactgcgcctggcccatttatgctgactttttttttttttttttttgaggagtctcactttgtcacccaggctggagtgcagtggtgcaatttcagctcactgcaacctccgctcccaggttcaagcgattctcctgcctcagcctcccaagtagctgggattacaggcacgcatcgccacccccagctaatttttgtatttttagtagagacagggttttgccatgttggccaggccggtctcggactcctgacctcaggtgatccaccctcctcggcttcccaaagtgctgggattacaggcgtgagccactgtgcctggcctatgttgactttcaagacagttgtttctgccttatatttggtttgcttgctcaaaatttattttcagttggtgattcatgtattcatcaacaaaagttttatacatggccgggcgcgatggcttatgcctataatcccagcactttgggaggccaaggcgggtggatcacgaggtcgggagatggagaccatcctggctaatacggtgaaaccccacctctactaaaaatatcaaaaattagctgggcattgtggcacgctcctgttgtcccaactactctggaggctgaggaaggagaatcgcttgaacccaggaggcggaggttgcagtgagccgagattgcaccactgcactccagtctgggtgacagagcgagactccgtctcaaaaaaaaaagaagttttatacatgaggcccatgaggtc

SEQ ID NO: 1912 - protein, 176 aa, Homo sapiens
MLTFFFFFFEESHFVTQAGVQWCNFSSLQPPLPGSSDSPASASQVAGITGTHRHPQLIFVFLVETGFCHVGQAGLGLLTSGDPPSSASQSAGITGVSHCAWPMLTFKTVVSALYLVCLLKIYFQLVIHVFINKSFIHGRARWLMPIIPALWEAKAGGSRGREMETILANTVKPHLY

SEQ ID NO: 1913 - DNA, 3532 bp, Homo sapiens
  source (1)..(3532)
  CDS (201)..(437)
  CDS (2622)..(3332)
tctgattgattatctaatatgatagaaaaatatacagtctgggagcaaatttagatttcagtgaaaaattaaactgttataccaacttgcccactgaagcattaaatgcattctctatgtaattatatcagcagatcgcagcggcgatatggctgtcactccagctgcctctccagaggtgctcaggacaacagccgcagatggccagcaccacctcccaaggcttccggaagacaggggccctaactgatttcattggcgtcttttccatggaaagcctgctgtctttctctgggcttgggagaagaggccagcaaatacccttcctcagaacgagaacctctggaatcaactggctccaacatctacaggtggaaatgaagaaaaccaacgcggtaggaatcgtgcgtgggctttcaggtgcccagaggcatttggtgtgtgctgagtgatccgcaaagccaggagagaagccctccttaagtgacagagcccagggcaccctcccccacagagactcagagccttaaattcttaccatcagcagcctggaggctcctcgatttgtcatctcagtcattagcggtgcagtaattaggttttggggttttttcccaggcctggaatgtaggatcaatagcagagatgagttaacataattggattctggatgggtcttttccttctcccttcgtcatctctaagtgaaaggctcctggtgcctccccctctgcctcccacgcttaccatccccagccactctaacctggagcacctggccccaccttccctcaccacctcctgcggggcatcacgcctatttcccagactgggttgggttccgtgtgctcctttgtaaaactgtgaatacatggagagatgaatgtaaaaaataacaaggtatggctggggatgggtgaagacatgagggaaggtggctgtcacagctgttctcagagacccatctctggtttgacttggaaggcggccccttcgtgatgctgctgcggccacagctgggacataacacctgcccactccctgcagtgactggagccactccttgttccaaccacacagtggcttctgctgcctctagcactacctgaatgggctttgacatgaaaagaattagggaggatttgaagaaataagacacgccacagctatctgtgtgcctcacacatgcacacagacatgctctcaccatctgagagggcaccttttcatgccaaccaacaccaaggagtggctagaacattttaacattgctggaaacacacttggagccctgggtttcacacctgcctctctgggaaggagccccgtttctcaggggacacaacagagaatgtgctggattgtcttggaaaggtgagaggcaattaaccacgagaagacaggtccttctcttacatcttttattaatcacctgctattgtttgctcaacaaatcgctctgattgagggtcacagggagttcagaattgctaggcagctctcagaagtgtggttgcctccttctgacaactttccccaggagaaactcctgagtctgtaggaacctagggctcacgtggactcggtgcctttggacttgctcacctttgtgagcaaaataccaggatgggtaaggctcactggatgctagcctagcgccagaaaggagcatagagtcagggagaagcagccagtatgatgcttgactcccggcctccccactggcccgtggctggactggggctgaagcctgagacccttgaccacagcctggtgttttcccaggaccctgattctgctcagtgggtttagccaaagtgtgcctcagtcactgtattagggttcttcagggaaactgaaccaataggatgtacatatagaaggagattttttttttttgagatggagtctcactctgtcacccaggctagagtgcagtggtgcaatctcggctcactgcaagctccgcctcccgggttcacaccattctcccacctcagcctcccaagtagctgggattacaggcacctgccaccacgcctggctaattttttgtagtttttttagtagcgacagggttgcaccgtgttagccaggatggtctcaatctcctaacctcgtgatcccctcgcctcagcctcccaaagtgctgggattacaggtgtgagccactgcacctgaccagaaggaaattttttacaaggaattggcttatacaattatgaaggcttagcaggctcaccacgtgctgtccacaagctgaagacccaggaaagccctggcgtaattcagggtgagactgaaagcttgagaacaaggggagctggtggtgtgagttctagtctgagggcaggaagagactgatgtcccaggtcaagcagtcaggcagaggagcaaaatctctcctcctatgctttgtattctattcaggcccccaaagtattaggcgatgcctccccacactggggactgccattgctttactaagtccatctaatcaaacattaatctcatcagaaacccgctcacagacacacccagaaatgatgtttcaccagtcatctgagcactccagggcccagtcaagttgacacataaaattaatggtcactgctacctagttgaaagacaataatgatgttgttggtgttgatggtgatggtgatgatggtggtggtgacagtgataaaggtgatggtgatggtaatgatgacggtgattatagtgataatgatggtgatcatggtgatgatggtgctgctgctgatggtggtaatgatgatggtgatagtgatagtgatcatggtgatggtgatggtgatgatgatggtgatcacggtgatgatggtgatgatcatggtaaggatgatgatggtgatgataatggtgatggtaatggtaatcatggtgatgatggtggtggtgatagtaatcatggtgacggtaatgatgatagtggtggtgatgatgatgatggtgatgatgatggagatcatgttgatgttgatgttgatagtgataacggtgatgatggtggtgatgataatggtgatcacggtgttgatggtggtgttgatggtgataatggtgatggtaatgatggcaatggtgatgatggtgatggtaatgatatggtgataatggtgatggtaatgatggcgatgataatggtaatcatggtgatgatggtggtgattatggtagggatggtgatgataatggtgatggtgatggtgagcatggtgatggtggtgttagtaatcacggtgatggtaatgacggtggtggtaatgacgatgatgatggtgatgatgatggtaatgatagtatagcagtaatagtactgagccagcctttaatagccatagacagctcaatcttcatcaagtccttcttacaccacatcgaatcccttcccgtagcatgccccaggtggacacattctcccacataagaacacaaggcacagactgggccctcttcccctcggcagctcttctgaggttcacagtggtgatcttcacccacctga

SEQ ID NO: 1914 - protein, 315 aa, Homo sapiens
MASTTSQGFRKTGALTDFIGVFSMESLLSFSGLGRRGQQIPFLRTRTSGINWLQHLQVEMKKTNAVGIVRGLSGAQRHLLKDNNDVVGVDGDGDDGGGDSDKGDGDGNDDGDYSDNDGDHGDDGAAADGGNDDGDSDSDHGDGDGDDDGDHGDDGDDHGKDDDGDDNGDGNGNHGDDGGGDSNHGDGNDDSGGDDDDGDDDGDHVDVDVDSDNGDDGGDDNGDHGVDGGVDGDNGDGNDGNGDDGDGNDMVIMVMVMMAMIMVIMVMMVVIMVGMVMIMVMVMVSMVMVVLVITVMVMTVVVMTMMMVMMMVMIV

SEQ ID NO: 1915 - DNA, 14750 bp, Homo sapiens
  source (1)..(14750)
  CDS (201)..(343)
  CDS (5163)..(5441)
  CDS (13911)..(14088)
  CDS (14443)..(14550)
cagcatcagctcctgcttgagaggttccaggctgcccttcctgacagcctgtcctatgattttggacttgccttgccaggtttttcctctttcttgaccccccaaaaccatatatatctcctgctggtttgtttctctggtgtaatcctgagggatgaacactcctccctcccagttcactctgggagaggttggggatcatgtttgtctatttccccatgcctggcccatgcgtgtttattgaatcactgaacaaccacgcattaggaagccagtcatatgtgcttcttcagaacctcatgtccattgccagatctccctggcttttgtggctagaggacaagtgagagatagtagcttacccacagaccttggccctgaggcccccaggggcctgagcctgctgtaagggaggagggagcccctgaggtctcacacacctccctggggatctggcattttcccctggggctggcctcagagctgggcgggggcagattatggagtgggttgtagagggagcacctccccactagcaatcatggttttttctgcgcctctcatagggaggcctacaggcctccaccttcagctcttcaggagccacaggcagctgagtgacttctgcatcacagtcttctcagagacaaacttgcagtaagaaagaggggcccgtgagggaccccagagaaggctgttgtcaaagcaggatgagagtgaactcttccatgggggacacccagcgtctccaagctcttttatgctgtcttcaaggggtctagagagcttcagcccaacatgagacccagtccagcagcatttccctgcgaagtgaaagttaggaccctgactagatacaccacgctgacctcagccagaatatcaagatgctgaggcgctgagatgctgggatgctaaggtgctaaggtgctggggtgctggggtgctaggatgctgaggttttgtgatactgggtcgctgagatgctgggatactggggtgctgaagtgctggggtactggggtgttgccatgctgaaatgctggggtgttgggatgctgaggtgctgggttgctgggatgctgggatagtccttggatgctgcggtgctgagatgctggtctgctggtctgctggggtgttgggatgctgggattttgggatgctggagtgctgcagtgctgcagtgctgagatgctggagtgctggggtgctggaatactgtagtactggtgtgctggagcattgagatgctagggcactgggatgctaaggtgctgagatgctgcagtgctggggtgttgggatgccgaggtgttgggatgcttaagtgctggggtgttgggatgctggggtgctggaacactatggtgctggggtgctggagtgttgagatactgtagtggtgggatgcttaagtgctggggtgctgggtgttgggatgcctaggtgctggggtgccgagatgctggagtactagtgtgctgggatgctgaagtgctggggtcctgagatgctgcagtgctagggtgctgagattctgggctgctggagtgttggggtgctgggatgctggagtgctgagatgcttggacaatggggtgctggaatactatggtgctggggtgctggggtattgagatgctagggtactgggatgctgaagtgctgagatcctggagtgctgggctgctgggccacaggctcttgaatccattcgtctgcccaggggaagaaaccagaagataaagagctaatgaaggagctttggttgagagggaggaagtaatggaaggagcaacatcttgtggaggagcaggagagaatggacctcaggttgggagagagggccaggctacaggccagagaggcagaaggattccagcagagtgtgggctccaggagccaaggggaaacaggtttctgggaggagagagtccagtactgctgaagtggcaagtccgctgaggaccaggaagcttcatttggctttatgaccaggaggaatttggaactgtgactagagtacttagggggaaggaggcaagactggagccagattgctctgggttgaggggtgagtgggaggtgaagcagggcactgtcactcctttgaagggtggcagagagctggaattggtgctggatgggctgtggggtgacagggtcatgtggaaagcccctggggggcacctggaaaaggagaagctgacagtacagtgagaggacagctaagggaaagcggaatggcagaacacgcactgccaggaggaatgaggatagggtcaggagtgccaggggcagtgaggccagcctggggtcaggtggcaggacgtgtccaggaagctggtctgcactgcagcccacactggctcagccttgaggttccctgtgtggttggggtaggaagttgaaccctctgggaatggaagatggaaccagctctgcgagccaagctcagcttttatctatgggtctctgagggctggcagagctgagtggggacaactgtgatccgtgaggctctcaggttgaggtggcccctccgggagggcttcattttcccagcgggtaggttctaagcagcagtggctgggcaggtgggtccaacacagagccagagaagggtgaatgggcctcctggcaccccacccctgctgcccctgagctcagtgatggagggggacagcacagctgagcccaagtgctttggtgtggccctgagggaaagctgcagcctgcctggggcctggcatggatgggacacttgaggcagagggacaatagtgggcgctgcagtgaggctggctcttggagaggtttcctgaggagtgctgcctgagacgggcagggagaacagagacaaagttggtgacagggaatgaaagctgactgaaggactttacccagacctatgaggatatctctctcagcaggaagcaggaggggactgtgtgaggactggccaagagctggagtgttgggaaaatgactctttctccgacccctctgtcctagctctggcccctggactgcggaggtctgcttccacccccattggtcgatcgttgtcccttgtcacagccattgagaattttggcagggagcatgttcttagagcatttttaggctctgcgggacataacagctctgcctcagagcacatgcctttctcagctcctgaaagccactgatcaaattggaacattttgtaccttagggatgaggatatcaactctcccagccacttagagggataaatgtgatgatgcattcaattgtgactacatctgatcccaactgttgcttcagctgctctcctatagcacatggcgggaggcgtgcatcccagtagctacctccccacttttggggagatgtggttccatccatgaaacctgggtacccgcctaccaggtcctggcctatcaggtggcagggtctggtcaaagaagggcatgtgtggtcttcagcaagggagacaggacggtggtgcagagcgtctagaccctcagggcaagtctcccccacacctgctcccggggcagttgtctttgtgacctcccatccccctctgtttcatcctctataaaatgaggggctgagccccaaaataacaggcttctttgccatgatgcaaaactgctgaatctttctttctgacacacaaggcatcgagcagcctctgaaagaaccaaagccactagcaggcttcctgacttgggtttgtaggtactgaatactcccttgaaaaataaaaacatagaggcacttttctcctggctgtttattacagaacgaagaaaaaacacactggcttgaaacagacgccagatttcaaatgtagaggtgaaatacgaggtggcaattaaaatgtgattacagaaagtctggacactgagaaaagtttacaggacagtgggtgtgggttttctataacagacacttaaatatacatgacgataattgcagatagaaaccatcaaagacaaaccccaaatcaactaataatgtttacagatgttcccccccaaaccacagagccttacatcaaaacaaatactgaaaggctttaaaccaggaacagctcgccttaaccccacgagggtgcacacaagctgggctttttctctcggtctgaatggtaaagggaggaggatactctagctcctccaggtggattgctgagacagggctcggctcacacactgtctctgcgcctctcccaaatctggagaactctcccagcctcctggtaaagtgtctctgtggggcacttaacgataaaacagcttctgctgtaaagctcattaggaaagagctagcggagactgaaaggttcgcaaaagagattaagaatcacacaaggcaataggatttttagtgaacatagaaataaatggccaagtggttttctatttggcatttgtcaacttgcacaacaactcttggtcatatccacattgctcattgcattaaaaccataagcgactcagccacctagcttaacaaggtatcactggagcaaacaacacggtctgcatatttgtaacattgtataataaacacaaaacaatgcatagtaaacacaactctactgaaacaaaagccgtcgctttatttacaaagtcacaaaatgaagtataaatacttctgtcattaatgtttaggaaaaccatttacaaaattttcaaatatgtacacgtagcttgaaaaatcaccagctttccattttgtcacaggtagagagagggataagcatgggctgacaacaccactcaaattgtaacgggagacaactgcgggtatggatcgacaccacttcctagagtgatgtcaccatgggggtttctatgggcatcctgctcagatttaaagtgccccagcatcctgggtgacttgcccagaattctgggctgtggcattttgagcagcagcatgctgttccaaaatgtcgtcgatcagcctcaagttgcacacccagtcttcatctgggctcacacaggagcctttcaagagagcttcaatgaaatctacctcattgcagtcaggtgacgaaatcagatcatttagtgggggttggggctggcgcaaaaagtcggcaggtggcagctcagggggaatatccgttctgtcgaacggacctgggaactggctggcagcaacggcagaagcagcagcagcggtggcagcagcagccacatagcttggtggctcgatgccctgtatggggctcaggggactaaagctggccataccctgctggaggaacttggtggtgtttgctacaggcaccgggccctgtaccgggctctgcctgaggctctggctgcccagcaggctgaagctggggttgttggccaggggcacttgtgttcccatcgcagcgggcacttgtgcctcccaatcagatggcctctgaaggcaggcctggccagaaggtgagtgctgctgaacgctattatccacttggctgaggggtgttttccccgaaactgctgtggtcacagctgctgccgctgtgacccatgcagcattgttgaacgcagtgggcattcttggcacactaggccgtctgagctggtggggactcaaggactgggtgcccagggagctgggacagaacccaggcaggggcacttctggtggggtggccttggggctctgcatatgctggcagacagagtcaagtctgcccaggggagtctggcctgagtgtgagaggatgggacactgggggctggaggtgaaaattccttgccgcttccccagagttggtgagatcactcccatgccctcgcagctctggtgcctggtgagtgggatcattcctggactcagattgttctgaagaagcccagttctgggtggcatcaagtgcttgctagatggggggcttgccttgatccggctacacttggaggtgacttgttcttggacggctacatacagaaagagagaagtggggatgagttccaaaggcatcctcgacttcggctgtggccaccggagggtagctcctggcccaacacggacttctcacctcccgcccttggctctctactgagctcccccctgctccccaattcctcgccattcccctcatttctctgccctcagcctggactgcagttcttctgggaagctgccccaactccctaggtctgtgctcaccaagagcagatcacactggactgaaatgccagctgatttgtctcttcaagaaaattggaagctcctggaggtcagggtccatgtctgcttttacactcagtgctctgtatgcaggcctggcactgcccaccctttgacaggtggtgcatattttgtagaaggaaggaaggggccaggtggggtgggctgggctggtggcgggagctagctcagcctcttagattctctacccgatggatgtgacctgggacagcaagtgagtgtggtgagtgagtgcagacggtgctttgttcccctcttgtctcatagcctagatggcctctgagcccagatctggggctcagacaacatttgttcaactgaacggtaatgggtttcctttctgaaggctgaaatctgggagctgacattctggactccctgagttctgaagagcctggggatggagagacacggagcagaagatggaaggtagagtcccaggtgcctaagatggggaatacatctcccctcattgtcatgagagtccactctagctgatatctactgtggccaatatctaccggtacttttttggggtggacactgagtcatgcagcagtcttatggtttacccaaggtcaggtaggggagacagtgcagtcagagcacaagcccagtgtgtctgacccacccaagaatccatgctcgtatctacaaaaatgattttttctcttgtaatggtgcctaggttcttttattatcatggcatgtgtatgtttttcaactaggttacaatctggccttataaggttaacctcctggaggccaccagccttcctgaaacttgtctgtgctgtccctgcaactggagtgtgcctgatgtggcactccagcctggacaagtgggacacagactccgctgttatcaggcccaaagatgtcttccataagaccagaagagcaatggtgtagaggtgtcatgggctacaataaagatgctgacctcctgtctgagggcaagcagcctcttctggccctcagacaaatgctgagtgttcccaagactaccctcggcctggtccaatctcatcccactggtgcgtaagggttgctgaactcatgacttcttggctagcctgcaacctccacggagtgggaactacatcaggcattttgctaactgctgtatcctaggccaataaatgttgatcacatttatagctgccatggtagggtggggacccctgctatctatctgtggaggctctgggagcccctgacacaaactttctgaagcagagcctccccaaccccttttccattccctatacctgacagatggcccaggaacccattagaaatggaaggtcactgcagcagtatgtgaatgtgcgtgtgggagaagggcaggatcagagccctgggggtgtggcagcccccaagtgattctaatccagatcctagggttgtttccctgtcccattgaaatagctgctttaaggggcctgactcagggaaatcagtctcttgaattaagtggtgattttggagtcatttagaccaggccttcaattgggatcctgctcttagagttggatgaattatttaactgattttcagatctcctctttctcaatgctttcagaagcacagtaactgcttactctgaaatgaattctcaccccacttccacatatgcaccccttgcccacccctttgggaacactggccttaactgcttaccttcaaatggactcatctgttgggagatatatgcattctgccgttcaggggtcattgccataagacctgatctctgttcctcttgctaaacagaagatgaaaaagacaaattagattacagctaccaattaataattagccttaggatcgctgcgtggggacctaggacttggctttggtgcagcagaaagcatgaataaacacaccagcatacactcgcatgcatgccccaccctctcgagcaaaattccacaggtataaataaagtaagattctgcacctgggttaaaaacacaactgcaacagcatagaatggggcaggagagacagaacttaatagcaagagcacacagaaaaaagttttaggcattttggatgtccatctgctcaggatgggtcagcagtgagatgcggtcaccaaaagaacaaatgtaacattaggctgcattaatagaagcagagtatgtagaaggagggaggtgacagtcctatgctaactctgccttggccagactatacccacaggagtctgggcatgccagtctcagggagacccagacagactggctgcattcagaggatggtaagtaatgagagtggggattggacttcaaactacccagacaaagaatggctgagcaagccaaggatgctgtggctggggcagagcagactgtgggctatgtagtggtggatacctagcctctgcagggctgtcatagggaaaggacattgagaagaggactgaggcttgttcctggtggtcctggcatgaacggccagatgatcacatggtcaggtggacacagtctccaacactgggagtagccaaacacttactgccaacctcccgcccttctcctgactagttgcagcataggcaattgggaggagcttcctgtctccatctgaaagctggctgggtgggcagggggaggagcgagccaagtttcaaggccgcagtttcagcactcagtctgggatcggctcaaggagcaaaggggaagaacatagccaggagggaataacatgaaggcccccagacccagaaaaggcatgacttgctctgagaccctcagccggttggtgtcaggttgtgactcggatccaggtctgactcccagtccagtgcttgaagcctcaccccacacagtgaggggagcccggccatctctgctcaactgctgccatctctctccccttctcaaccaccaaggcagctctgtctgggagcacaagctccaagtccactttctggtctgtgtcccccccaagatgccagaggacttgcctctacaacacgggctgcccgtgcagtgcctgcttttccagcaaagggcttctgggaacccttctctgcactcagtggggctggtgggagtggggcggggtagcgacccagtgcttgggactgtgcccagctctcaggcctggcagcagttcctggccttggttcctgccaaggcagagaggacaaacacatggcaccgggaagactacaccagaagcgattccaccagactggggtttgcttttctatcccgcccttagcctgcttcctgtcctggtccctgcctccccctccactggagctgccgtgtgggcagtgaggggctgtttctcagctgccctatggagctgccctctccctgccaaagcattggcaaggcggcaaggggtgggggtggggatggggggtgggatctgccttctcaagctctcattatactgagcacgtctcacccattattttatgtcatctagcaacaccccatgtggacactgaggagcatgggggtcacatgaccactgcccaaggccacaccatccggatctgcctgagatggtcagggttggcagccatttctgaaggcagtcctttcgctttggctcttcttgtaccagtctcaggacatcagggcagaagatctacagtccccagcttactgatgtgacagcagaggctcagagaggttaaatgacttgcccaaggtgacacggctaagaagtacagtatctcctaactgcagaccaggtgcttctgctgcttctggggacagattcctgcgtggctggctaggtctaaacggtccttaactccatccccaccggttgctgcattagtttcatcaaataacacagttgtacagaggtaggggttcaggggcaggggcagatggaggctggagagtgtgactaaggaaacagcaggggaagtgcggtaaagtccgaagggagggacggaaagagaaagccaagcccaggggcgtgccagacaaaaggaaaggccacgccggggcagggcaggcttcagcgggtgctggggcgtcttcatcccgggaagcacacattccagaggaccccggagtctaatggaaaagctggccagcctatcactatggaaactgccaaggccacacagcgctgctgacacccagcctgggtgccggtggccagctctgcaggatcttcaagtctggggtgccaccagcaagcgacggtcctccatgggctcttcaccttacggcagtgtccagaggcaccgccagtcctctgctcctatgctggtcctgctgtccctggcaaaaggagccagagcattctctccaggcctcccgaggaggctgcttcctttgttttgcagatggaggctcccatcctttgttctgaatcaatgtgctccaaagataagccccaagaaaacagttgttgccttttgacactgacaattagaatcgttggaaaatggagaaaacaggaaatggcaaatggtttcagtgaccaggaggaaaccgtgcctgaaagttgctgcttagtgactgggacactcgctttctgctctcttatgaaggacagcctaggccgtgtggccttttataaacaaagctatgaaggggtcgtcaaattttctagggctgcaactgtggcactacgtcctgttgtgccaggtgacactgacaagcagcactgagttctatgcaagcccaggtgtgcttctctcatggtgacccccagagaactaaggcccagctcttcctctgtcacacccctcccagcccccactgtcagacaagggaccacattcacagacagtctcagccaagatggcaaccttggaagtcctggggatgcctttctagaagctttaggctgacgccagggagctgtaaagcccccacctgtccctgggggttgtgtgctgggcaggagagaggggaaagagcccaaactccaccactgcctgctggcacaactgagcccacgccaggcactgcaccagcttcactcaccagctaccacatgctaatgtctcctgtttacccaggtgcaatcacctgagtgctgctttctcaccactgcatgggaagaacgatctcattaccaattcaaccacttaagcaggcaaaaggactccaacgggggaaaggcagaggacaaacgattcggggactgagacagatgcccacaaaatgttcctggattttagccggattcgggctgaagttccttgccctatgagcccttggaggagagcatcctgactcagacaagaattcaaatgacaagacttctgggggatggcagtgaatggatccaaagccttgttttataaagaatgtggaggaagggaggaaggaagggagggaaggggagactgagagggagagagaataaagaagaggaagagaaggaagaggaggaggaggaaggggaggggagaggaaaaaggggagggtagaggaggagggagaaggggaagggaggacagaagaggggagggagcggggagattatctacccctccatgctagggaactcctgtctccttttccagcagacactgctccatgagtgcccccacagagagccagcctgccacacagcagaaggtgctcagctatctgtcccaaaggttgagcactagtgtataccacaaggaaaaaaaccttcttttgtactgtttggaagccagaattagaaacaactcgttcacccttctgactttccctttgcaatgacaggaagatagtatactgcatgggaccaccacacattcaagatctgagttgtggggacccccacccccacatgggtggagccccctgagacccgtgggctctgactggccatggcccatagatagtgacaacatacacactgctatctgaagcctagttggaggacggatggatgcttttaggaaaaaattccctttagtcgtccctcagaaactacaacggcttcctaaaatgaatggcaggcaagttttgattgtttcctaagttccccctaactctcagagcctgtgactcagcttctccagaatgcctgcagggaggcaggaccactgggagtaatgagcacgaattgggccacttctcccagtggactgttaacgccgagatctggggtggaacccactgaacacctgcccttttgcgttgcccagaatgcagccagagggatacgggccacagtaactctggggcccctgaacctaccttcccaagaccctgacgggaaggtattgcttacatgacagtccagtcagtccctctgtcactcagttaacaaacatggtcatgggtctactatgggccaggctctgttccgggcatggggataacaccgtgtgtctctactcttatggacacaagtaaatcaatcaaagcagataatgttctaatgaccacccagtagggtgaagggatggagggtgggcaggtgctggcagaaacctaaggtcaagtcatgggaccccaatggggaactggaaactgccacaccattttctatgttaggggtctttccttgcccttctagagacctcacccatggtaatgatgctgccctcaggtttgaactggtctgaagctgtcactgggggcttcacaaaatgaatgccactgaaagcaaacggcagagatctgtatatgaaattctttttaccctttgttttctgtcttcccacatgatctatgactgctgcaaactctattctgactcctcctcagtcttggccggtctgggaagaacttggtttagatgctgggaatgatcccgggcaaaggaaacaaatatatttccagcttgcttttcttcttcccctgtggtgcctgcatcctctgtctcgcactgactcacaggctggactgacaaagtggctgtgttgacagggaggatttagtggatgccaggcctgaccctcaaaggccctcaggtggggccaatttccaaggttcttagagaagatttggggccacaaatctgctctgccacttcactgctgggtgaaagctgttggcttgagaagagagagaataggtgagggacaataattctcaaggcaagctagctgatatcctttcatttgtggcttccaaagacagggaaaggcaaggcagaccagggtggaaacagcgacatcctgaggggacgacgtccgttttgctaattctgtttccctggcagctttgtgctggacaagatttctctggtttcagctgaagagtgaacagctgaggagctctgtgactctgagagagagagaaatcaatagcccttgaaaggaaagcactgcttgttcttccaggccagggcaggcaggataaagagaacaaggctgtacataccaaagccgaatttccattaaaggccagaatcctgggaggccctttcagcttaatgaccatcttctgatcactatcacttagaaaatgttcatgtctccagttttctctgcagatagtgcagacatcctgtgcacattgatattttatgcaccagatgcaattctctgcaaaggtcccctctggctggtgtccatccgcttgctctcatgaccactgatgcgactctgggggcaagtcaagccattccttctagactctagaatctagaggatgatcccaactcacaggcctcttggacaagcttgctttggattccttctgcctgtactacccagactgccagtcctccagcagggcaatccaacttcctgcctctagggtgtgggagtcctgggcggggtttggaatccacagcagatggctggcaggagaggcagttcccgagcacccactaggtgccaagcaggcaggtatcaggtgcagggcttcggaggtgcagaagcacagcccctgtccccctcaggttcccagtctggcctcagggacagacaggcaggtaggtatggaaacggggtactggaaggcatacagctgagggagagagcagctgcaccctggtcaatcccccactcatttccctggaggtggggctgaggcacctggagcactctgcttgcttgggttgtccctttgccaaagaatgccgggcagaaagtagagaacaagcaggcccaggaagcactagaagtccctcatgggtggacagagctttaccttcggagctgtcacctcctgtgttcctcccaacaaccctgtgaggcaggcgggcaggctgagcaggggactgtgccccgttgacagatgaggaaagcgaggctcagggggaagtgacttacctgtggcgtcgcagctaggcagtagtggagcgggcacctgcctccaggccttcggatcccagctgccccagggcgctgcctctgaggtgctgtacgaggaggtgactcgggccagctcatgagcaaaggagctgccgggcaggaaggactcactccccagggcctggcaggacgggggctgtcgcccgaggctgacctgggggtgcctggcttccccaagcttgcaggctttgtctacatgagtctacaacaaccgattgaacaatccatcagctgcttggccacaaaatggttctgactgatcttgtcactgccctgagtg

SEQ ID NO: 1916 - protein, 235 aa, Homo sapiens [sequence omitted]

SEQ ID NO: 1917 - DNA, 1165 bp, Homo sapiens
  source (1)..(1165)
  CDS (201)..(965)
gcttctccccttcccccaggtgaatatcggctccacaaaggggtcctgtctggataagcgggtgagtgggggagggagtatggaggggtctgagccacttggtaaagggagaggagaccctgagggtctaaggaaggaagcatggccctgccccacgagtcccagactgatggggagacgtggtcctctgtgcttaggggatggcgtcagctgcacacactctgggctgtcccgggaggctgtcacctatgctaagcccttctgacaccttcttccctgatcctgggggtcctagtgctaggcttgccagggccttccagcaaccaatttctctcctcccttctctcttccccgggcaggactgcgagaactacatcactctcctggagaggcggagtgaggggctgctggcctgtggcaccaacgcccggcaccccagctgctggaacctggtgagaaggctgctccccatgtgcctgatcagctcaccttctactgcgtgggcttctgcccctcatggtgggaaggagatggcgagactccaatgctggccttgccctgggaggatggggctcctggccgagaaactggccgtcatgggaggcagtggctgtgggattatgtggccatccaaccctctggatctcccacaggtgaatggcactgtggtgccacttggcgagatgagaggctacgcccccttcagcccggacgagaactccctggttctgtttgaaggtagggcagtgctggagcaggcgccccagggggatgcttctgaactggggtgggagaggagtggtcagctctttgtccagtgtccggaggagggacttccaggagctgcctgcccttactcatttctccctcccactgacccagggggacgaggtgtattccaccatccggaagcaggaatacaatgggaagatccgtcggttccgccgcatccggggcgagagtgagctgtacaccagtgatactgtcatgcagagtgagtcaggctccggctgggctgagggtgggcaagggggtgtgagcacttaaggtggcagatgggatcctgatgtttctgggagggctccctgagggccgctggggccatgcaggaaagcaggaccttggtataggcctgagaagttagggttggctgggagcagaggaa

SEQ ID NO: 1918 - protein, 254 aa, Homo sapiens
MASAAHTLGCPGRLSPMLSPSDTFFPDPGGPSARLARAFQQPISLLPSLFPGQDCENYITLLERRSEGLLACGTNARHPSCWNLVRRLLPMCLISSPSTAWASAPHGGKEMARLQCWPCPGRMGLLAEKLAVMGGSGCGIMWPSNPLDLPQVNGTVVPLGEMRGYAPFSPDENSLVLFEGRAVLEQAPQGDASELGWERSGQLFVQCPEEGLPGAACPYSFLPPTDPGGRGVFHHPEAGIQWEDPSVPPHPGRE

SEQ ID NO: 1919 - DNA, 1132 bp, Homo sapiens
  source (1)..(1132)
  CDS (201)..(932)
  modified_base (1038)..(1162): a, t, c, g, unknown or other
ggagcggtgggctacctgttcctaactccccctcagcagaggattctgcagctcagtctctctgcctgttctgtttgaaaattggcccctggaatttctaagcaggtctgtaattagataggtgagcactgtgtaaggagcgcctggtggagaagggagccacgaagaatttcacagtatgcttcaaagccaaagcaggaatgggaaggaagtgctctgtgtgtgaggccgggacacgtggttacaatgtgcctgacggagaaaacacccatgtggatgggcgtcgtgtgtgtggatgggcgtcgtgtatgtggatgggcgtcatgggtgtggatgggcatgtgtggatgggcgtcgtgggtgtggatgggcgtcgtaggtgtggatgggcgtcgtgggtgtggatgggcgtcatgggtgtggatgggcatcgtgggtgtggatgggcatgtgtggatgggcgtcgtgggtgtggatgggcgtcatgggtgtggatgggcatgtgtggatgggtgtcgtgggtgtggatgggcgtcgtgggtgtggatgggtatctgtgtggatgggtgtcatgggtgtggatgggcgtcgtgggtgtggatgggtatctgtgtggatgggcgtcgagggtgtggatgggcgtcgtgggtgtggatgggtatctggatgggcgtcgagggtgtggatgggcgtggtgggtgtggatgggcgtcatgggtgtggatgggcatctgtgtggatgggcgtcatgggtgtggatgggcgtcgtgggtgtggatcggtgtcggagtgtatgggcatccgtgtggatgggcgtcgtgggtgtggatgggcgtcatgggtgtggatgggcgtcgtgggtgtggatgggcatgtgtggatgggcgtcgtgggtgtggatgggcgtcatgggtgtggatgggcatgtgtgaatgggcgtcgtgggtgtggatgggcgtcgtgggtgtggatgggtatctgtgtggatgggtgtcatgggtgtggatgggtgtcgtgggtgtggatggctttctgtgnnnnnnnnnnnnnnnnnnnnnnnnnnnnnnnnnnnnnnnnnnnnnnnnnnnnnnnnnnnnnnnnnnnnnnnnnnnnnnnnnnnnnnnnnnnnnnn

SEQ ID NO: 1920 - protein, 243 aa, Homo sapiens
MGRKCSVCEAGTRGYNVPDGENTHVDGRRVCGWASCMWMGVMGVDGHVWMGVVGVDGRRRCGWASWVWMGVMGVDGHRGCGWACVDGRRGCGWASWVWMGMCGWVSWVWMGVVGVDGYLCGWVSWVWMGVVGVDGYLCGWASRVWMGVVGVDGYLDGRRGCGWAWWVWMGVMGVDGHLCGWASWVWMGVVGVDRCRSVWASVWMGVVGVDGRHGCGWASWVWMGMCGWASWVWMGVMGVDGHV

SEQ ID NO: 1921 - DNA, 1333 bp, Homo sapiens
  source (1)..(1333)
  CDS (201)..(1133)
  modified_base (260)..(359): a, t, c, g, unknown or other
  modified_base (398): a, t, c, g, unknown or other
  modified_base (1066): a, t, c, g, unknown or other
  modified_base (1143): a, t, c, g, unknown or other
  modified_base (1194): a, t, c, g, unknown or other
  modified_base (1241)..(1333): a, t, c, g, unknown or other
aaaagaagtacctagtctttatccaaactcttgcactcccactttcaatgcaggactgttggcagacgtggtacacccagggatttttcttttctacctgctgaggagtatcccatgcacaggtgccccataattgttgagcttaatggtcaggtttcacacgagaacaggcagactggaaactctgggttcatgttctgatgctggaaaacttttcccatgctgctaccttctttcccagctttacatcagaaaactannnnnnnnnnnnnnnnnnnnnnnnnnnnnnnnnnnnnnnnnnnnnnnnnnnnnnnnnnnnnnnnnnnnnnnnnnnnnnnnnnnnnnnnnnnnnnnnnnnngactttagacgttgcatgccctgcagttgcggactctanagaatccccgctcccctctggcctatttatatcctggtacctgtagtctgcacctgcaggtgggaccgcatacaaagccggccttacaccaccatcctcatgggcatctactttgtgcttgggctcagcagtgttggcatcttctattgcctcatccaccgccaggtcaaacgagcagcacaggcactggaccaatacaagttgcgacaggcaagcgtgcactccaaccatgtggccaggactgatgaggccatgcctggtcgtttccaggagctggacagcaggttagcatcaggaggacccagtgaggggatttcatctgagccagtcagtgctgccaccacccagaccctggaaggggactcatcagaagtgggagaccagatcaacagcaagagagctaagcagatggcagagaaaagccctccagaagcatctgccaaagcccagccaattaaaggagccagaagagctccggattcttcatcggaatttgggaaggtgactcgaatgtgttttgctgtgttcctctgctttgccctgagctacatccccttcttgctgctcaacattctggatgccagagtccaggctccccgggtggtccacatgcttgctgccaacctcacctggctcaatggttgcatcaaccctgtgctctatgcagncatgaaccgccaattccgccaagcatatgggctcctttttaaaaagagggccccggagtttccataggctccattanaactgtgaccctagtcaccaggattcaagactggctcctccaggaccaagnggccagtaataggagataggtgaaaaacacatgggggcatttcacaannnnnnnnnnnnnnnnnnnnnnnnnnnnnnnnnnnnnnnnnnnnnnnnnnnnnnnnnnnnnnnnnnnnnnnnnnnnnnnnnnnnnnnnnnnn

SEQ ID NO: 1922 - protein, 310 aa, Homo sapiens
  MOD_RES (20)..(53): Variable amino acid
  MOD_RES (66): Variable amino acid
  MOD_RES (289): Variable amino acid
MLENFSHAATFFPSFTSENXXXXXXXXXXXXXXXXXXXXXXXXXXXXXXXXXXDFRRCMPCSCGLXRIPAPLWPIYILVPVVCTCRWDRIQSRPYTTILMGIYFVLGLSSVGIFYCLIHRQVKRAAQALDQYKLRQASVHSNHVARTDEAMPGRFQELDSRLASGGPSEGISSEPVSAATTQTLEGDSSEVGDQINSKRAKQMAEKSPPEASAKAQPIKGARRAPDSSSEFGKVTRMCFAVFLCFALSYIPFLLLNILDARVQAPRVVHMLAANLTWLNGCINPVLYAXMNRQFRQAYGLLFKKRAPEFP

SEQ ID NO: 1923 - DNA, 982 bp, Homo sapiens
  source (1)..(982)
  CDS (201)..(782)
  modified_base (16): a, t, c, g, unknown or other
  modified_base (56)..(156): a, t, c, g, unknown or other
  modified_base (211): a, t, c, g, unknown or other
  modified_base (662): a, t, c, g, unknown or other
  modified_base (897): a, t, c, g, unknown or other
  modified_base (938): a, t, c, g, unknown or other
  modified_base (944)..(982): a, t, c, g, unknown or other
ttacgtgtgtatcctnctagcgctaaagcgtggggtgtcatgcaaccgcaggtgcnnnnnnnnnnnnnnnnnnnnnnnnnnnnnnnnnnnnnnnnnnnnnnnnnnnnnnnnnnnnnnnnnnnnnnnnnnnnnnnnnnnnnnnnnnnnnnnnnnnnnggtggagagccataggctatggggtggacaggcttgggtgcctcatgggagctcnccatgggagctgtggccccttggggcctcttatttctcaccccaggctttcccgggagaggttcaagtcagaagatgccccaaagatccacgtggccctgggtggcagcctgttcctcctgaatctggccttcttggtcaatgtggggagtggctcaaaggggtctgatgctgcctgctgggcccggggggctgtcttccactacttcctgctctgtgccttcacctggatgggccttgaagccttccacctctacctgctcgctgtcagggtcttcaacacctacttcgggcactacttcctgaagctgagcctggtgggctggggtaggtgctgcctggatggacagaataaacggccggccctgagggtgcagagggaaatagccttggggagagagaggaggggttcccagagctggagggatggccatctggaggggacgtggagngaggaagtgccagtaagccccagtggtgtcatgccatttccccttgtgcccaggcctgcccgccctgatggtcatcggcactgggagtgccaacagctacggcctctacaccatccgtgatagggagaaccgcacctctctggagctgtgagtggcggctgtgggagcaggggtgatgccagctccccggctacacatattggggctggagagaggtggggagaggagggatttntaggaggggatcctctacagtcaactgcgggtcatgccacntagtcnnnnnnnnnnnnnnnnnnnnnnnnnnnnnnnnnnnnnnn

SEQ ID NO: 1924 - protein, 193 aa, Homo sapiens
  MOD_RES (4): Variable amino acid
  MOD_RES (154): Variable amino acid
MGAXHGSCGPLGPLISHPRLSRERFKSEDAPKIHVALGGSLFLLNLAFLVNVGSGSKGSDAACWARGAVFHYFLLCAFTWMGLEAFHLYLLAVRVFNTYFGHYFLKLSLVGWGRCCLDGQNKRPALRVQREIALGRERRGSQSWRDGHLEGTWXEEVPVSPSGVMPFPLVPRPARPDGHRHWECQQLRPLHHP

SEQ ID NO: 1925 - DNA, 937 bp, Homo sapiens
  source (1)..(937)
  CDS (201)..(737)
  modified_base (570): a, t, c, g, unknown or other
  modified_base (594): a, t, c, g, unknown or other
  modified_base (603): a, t, c, g, unknown or other
  modified_base (631)..(731): a, t, c, g, unknown or other
  modified_base (814): a, t, c, g, unknown or other
aatagaaaaaaagagcggaccagttccccatgggcacacagctgcccacagctgctgcctggttacttcctgacagacatgggtttgctgctatgggaacgatgtctgtcccacaggcaaggagtgtccctgtgcccgtgtgcttgctgctaaacagtgacaaggacattaggaaaacagggccttcttaactcttgaggatgacagtgcatgcaccaaagaaaccaaaggagccgttgcctctgctatcatttttcttctttttttttcggagacggagtctcactttgtggcccaggctggagtgcagtgacacaatctcggctcactgcaacctccccctcccaggttcaagcaattctcctgcctcatcctcccgagtagctgggactacaggcacacaccggcatgcctggctaattttcgtatttttagtagagatggattttaccctgttggccagtctggtctcgaactcccgacctcgggtgatctgcccaccttgcctcccaaagtgcttgtattacaggcctccccccctgtgcctgaccctctgttatctttttaatnttttaacacagaaaggggattctntagagtcgncaacgcggggtttgcaagatctagccgnnnnnnnnnnnnnnnnnnnnnnnnnnnnnnnnnnnnnnnnnnnnnnnnnnnnnnnnnnnnnnnnnnnnnnnnnnnnnnnnnnnnnnnnnnnnnnnnnnnnngtttagtcatggaagagaagtaaccggtcattctggactaagtgcagtccaatggctcagctcaaaccggcctgcattagggntaggttgttaagtaaagtttcctgccctgacagcacatgtcttgctgtgaactctaggctggaagtgggcccataaaaggccctcacattttaggagtaaaactgtgggctaagcaccttttg

SEQ ID NO: 1926 - protein, 178 aa, Homo sapiens
  MOD_RES (124): Variable amino acid
  MOD_RES (132): Variable amino acid
  MOD_RES (135): Variable amino acid
  MOD_RES (144)..(177): Variable amino acid
MTVHAPKKPKEPLPLLSFFFFFFRRRSLTLWPRLECSDTISAHCNLPLPGSSNSPASSSRVAGTTGTHRHAWLIFVFLVEMDFTLLASLVSNSRPRVICPPCLPKCLYYRPPPLCLTLCYLFNXLTQKGDSXESXTRGLQDLAXXXXXXXXXXXXXXXXXXXXXXXXXXXXXXXXXXV

SEQ ID NO: 1927 - DNA, 6554 bp, Homo sapiens
  source (1)..(6554)
  CDS (201)..(445)
  CDS (1816)..(1974)
  CDS (2025)..(2375)
  CDS (4135)..(4250)
  CDS (6299)..(6354)
  modified_base (63): a, t, c, g, unknown or other
  modified_base (3149): a, t, c, g, unknown or other
  modified_base (3155): a, t, c, g, unknown or other
  modified_base (3165): a, t, c, g, unknown or other
  modified_base (3179): a, t, c, g, unknown or other
  modified_base (3180): a, t, c, g, unknown or other
  modified_base (4180): a, t, c, g, unknown or other
  modified_base (4189): a, t, c, g, unknown or other
  modified_base (4193): a, t, c, g, unknown or other
  modified_base (4196): a, t, c, g, unknown or other
  modified_base (4201): a, t, c, g, unknown or other
  modified_base (4302): a, t, c, g, unknown or other
  modified_base (4308): a, t, c, g, unknown or other
  modified_base (4334): a, t, c, g, unknown or other
  modified_base (6523)..(6554): a, t, c, g, unknown or other
gttgcttcatcctgtgggggccgtggccctgtccctgtgtgggtggggccttttccatttccntgacttagaacccacactccacttagaacagggtttgagaggcttagtcagcactgggtagcgttttgactccattcttggctttcttctttttctttccagaaggatttttgtgcagaaatgggtcttttgttgccatgttagtcctccttggaaggcagctcagaaggcccgtgaaacgtcgggggacaggacccccagggagggaatcccaggctacgcactttagggttcgttctccagggagagcgacctcgtcccccgatcctgaccgcccttccggcccacgctctcctgtttggcttccacaggcctggacttctctggcttctctgcccacacactccctgcccccagtgtccctgcccctgccccagcacaggtgacttcatttctgtcctctcagctcagtggactcgctcaacttttgtataagtctccacttggtggcagcagcttgctgatgacttgttttaaaactttcatcctaaataaccttttgatacttgaatatttttaagttttatacataatttctaatttttttccgaacagatccagatacctaataagatgctggaatgtaatccctggacaatccgtgtcctggcagcatttggtctttctctaagcgcctggcttcgctgttctaaggagtgggtcttaagtctctggagaacacaaggacttcaatttgtgctgtcagtggctcttttatggactgtgggcaccaccacagctttgtccctgctgtactgtgtatccccttgcctttctggcttgtggctctgaacaaagcaggtcacccatcccaatttctagagcccccccaccgccacccccacccttatggagcctctatcgtgcaagaagtgtccctgaggcacggaggtggttgtgctgggctcagagccgccgtctgactggttggaagccctgctctgattttgtgaatcaccctagttaagtggaagctcagcgtagcctgttccctctgtgggggtgtgcagaagcactgtttatttttgcccacatcttagagtgataaatggaactcatttatgaattttgacttccaaaagctttccactttctcccttaggaacatggataaaaattgtccacatttgtttttggagacatggattgttacctgaaacctacttttcagatgttcttgatgtgaaaactgttgccaggctgggcgtggtggctcatgcttgtaattccagcatcttgggaggctgaggtgggtgggtctccatttattttttctttctttttttctttcttttttctttgagacggagtctcgctctgtcacccaggctggagtgcaatggcgcgatctccgctcactgcaagctccgccttccgggttcacgccattctcctgcctcagcctccggagtagctgggactacaggtgcctgccaccacgcctggctaatttttttttgtatttttagtagagacggagtttcaacatgttagccaggatgatctcgatctcctgacctcgtgagccgcccgcctcggccttccaaagtttttagaatacaggcatgagtcactgtggctggccttctttttatttattcattctatttgagactgggtttcaccttgtctcccaggctagagtgcgtgggtatcatcataccctactaagaattgatccttctttggtcaaaccatcctttccctctgccctcctgagtttctgggactacagacccgtctccactctagaggatccccgaccagcctggtgccgtactacagcgaagaagagctgatggggaaaacggtggtggtcttatgcaatctgcaaaaagcgaaaatgcgtggtgaaacgtcggaatgcatgctgttgtgtgcggaaaccgatgacggcagtgaaagcgtgctgttaacgccggagcggatgatgcctgcgggcgtacgcgtcgtataaaaagatcggatggcgacgtcgtatcgccatccgatttgatattacgcttcttcgacacttactcgcatggccgccagcgccttacgcgccgctttgatcaccagttcacactgttcaatggtcagtgtcagtggcggttcaatgcggatcgttttggcgttattgagcgttccggccaccagtacgcgctggcggaacatctcgctggcaaagttatagccgatttcgttatcaacaaactcaatcgccatcaacatccctttaccacgcgcttcctgtaccagatcgggatattcccgcgccagttgacggaaaccgtccagcaacatatcgcctttttgctcagcctgagccggtaagttctgctccagcaacacattgatggtcgccaggggacgggagggaacctggacacctactcgaccctgaaagcactaataaagaacaaaatgagaggtttttagggagatgtgcaaattgaaattgatagtctttgctggtggagaattctgggtttccagaaccttgggcccagcctttcctacagctcctgtagacttggccatgttggccacatcactagacgccgaatgcaagtcagtaaatgaatataggaattattatagagggatggaaagcccagtgccttgagtcagacagggcaggtcctcaggaaatggctgaggaggtaattttaccacttggacccacttttaggacttgctggattcttctccgaatgtcctcaaggtcccacagtctctttcccattaggttttattttttcccccttaaatgttttgtttgttttttgtttttaagagacagcgtctggctctgccatccaggttggaatgcagtagtatgatcatagctcactgcaacctcaaaactcttgggctcaggtgatccaccacagccttttcagcagctgggactgcaggctcaaaccactatactgggctaatttttaattttttttttttgtaaatacagggtcttgctgtgttgcccaggctggtatcaaactcctgggctcaagcattcctctagcttcagcctcctgagtagctggggttacagggatgagacacctcaccagggggtacgtagctagggtcgtttcagngttttnttcctacctnaatcagggtttctnnccctcctatgaactccatggatgcacgctgcactctagagcatccccagtccccagtcctgaccccatgggctatgaaaaggaggaagggctcttccagtatgtgctatgtgtaaagctcagaaccaggctccctgggacacccagaaatgaaccagttattcctgccttcaaaaagcacagttggcccagagcagtggctcatgcctgtaatcccagcactctgggaggccaagacgggtggatcacttgaggtcaggagttccagaccagcctggccaacatggcgaaaccccgtctctactaaaaatacaaaaattagctgggtgtggtggtgcacacctgtaatcccagctactcgggaggctgaagcaggagaatcctgaactcctgaagcaggagactcttgaagcttgaactggggaggcagaggctgcagtaagcagagatcacgccactgcactccagcctagagtgaaactccattaaaaaaaaaatccacacaatttctgccatcacatggatgaacattggtaacattacactcagtgaaataagccaatcacaaaaagacgaatgccccaggactggacttacatgaggtatctataatagctgaattcagagacacagatggagaatggcagtgccaggggctgggggcagggaatggggagttattattcactgggtacagagcttcagtcgggaagatgaaaaagttcaagatggacagtagtgatggtcgtacaacaatgtgaatgtagtcaacaccacagaactgtatggataaaaatggttaaaatgttcccctgcttcacttgactggccttaccacccaaagaaacaatttaaaagggttaagacagtaacttttgttatgtgcattttaccaaactttttaaaagttacaaacatggtaaattttaagttaagcaccttttaccatttaaagaaaagcacacagcctagaatcacaaggcagacgtgggtggcccgtngatacaatngggnccnttgcnaagggccattcaattttttccgccttgttggccgagcgccgcgccgtcggtacgttgcgggtgacgggacgcgttatagtgttctgctagtcgccgcacgnggaganatgtttgtaattatgtagatggacgncagcagtggcggttctgagtgctttcattaaaaaacagttaacatcgggtttaaggattagaaagtggggttcgtggtttgtgtctgtgacgtgagactggttgaagcacttcacgtcttcctccgggaagactctcttccccttcccccccgtcactgatgtactctgtgtgcacatcatcgatgagcaggcatggcctgtgcctgtgccgctctgagccttcctaggtgtggcctggcacataatgaggcagatgcattcccaggcaggtagcagctactgagaacagccaaggcgtgtaagctggggagccagtgtccagggggaacagcttttgtcagaagcagcactgaggcgaggggagctgacccacggcctcaggggtctcatgcagggacagaagctgtctggcccaggcaggacacaggctgggcgtgaacctgactgtagttgcctcagaaccacctcatggctgggtgcggtggctcacgcctgtaatcccaacactttgggaggctgaggcaggtggttcatgaggtcaggagcccgagacgagcctggccaacatggtgaaaccccgttgctactgaaaatacacaattagccacagaatggtggtgcatgcctgttatcccacctactttttacgctgagacatcttagcacctcattttttagtaagtacacttgcagatccggagagggcaggtggaggtataatccagtgtcagtctgcagtggtgggcctgccctggccgtctccaaagatgggtgctcttcggaactggcagccccctgcatgctgtctaattgccccaagaaaacagtgacgtgtgtttaggagcatgctcctgttggcctccatttacaggatcctctgtgtcagaggatctcagccaggcgtgattttgttcacaagggacacttggcaatgcctggagacattttggttgtcaaaacagcaggacggcagacgtgctcctgtacctataggtagaggccagggcatgctgctcagcaccctaaggtgcccaggacagctgctcatagcatctgtcgcccaattaacactctactcgtacccatcctcaatttgtaaaaaagggagcaaatagtggatatgaattactcatgcactaggaagaatgaagtattgcatctgaagcaattctagtttgttgtcaaggaagctgaaccaggaggtaatcagaaggtactgtgagcccattagagtgagaaattcaacccaaagaggccatcacctctccaaatcctgccctaccatcaaagaggcgggttctaacagacaggcttcaaagataccaagaggcaacgacgtgagagcaactcctgtgtgtgtccccggggacaatctgatgaagaaagcaaatctagccccttatccaaaaggggaaccatggcatgaaataaatctccctggaagcccacagtgcaaactggctgctctctctgatgcatcaacaattccaggaagcagtgagggtggaggttactacccccatcttacagatgggaatgcgggtccagagaggatcgttgcccagctccgaaatcaacacccacagctgattttcatcatatcccagaagcatgctgcaaggagtgtgaatgaaacaccaagtatacagtaagaggaagtgagctgagcttgcaagtgggtggagaagaaacgcactccccaggcagcctcagggcctcagaagccctgcttccacctcccctagcagaccaagcctgggtggggctgggctcagggattcccatgttttcagcacttcatacctgaacccaacctggaagcaaatgctgctccaagacagttatagccactgaaccaaatgacccaggcagagaggcagcaggaggtggcagacacagaggccattccctgacacctggctctggcttctccaagataagtcattcacccctcctcccctagaaccaaacatgcagctgtcactacagcagggtcaaaatcccatggacggtaagtgaaacttcagtgtaaccttcctcctttcagaagtacattcgacagagggaggtagatcctgttggtccccatgcaaggggtgaagtggttcaagcactatgggagtgggggcacagcaggacccccgcatgctctgctagacatggagctctagagggaaccgtgcccacnnnnnnnnnnnnnnnnnnnnnnnnnnnnnnnn

SEQ ID NO: 1928 - protein, 308 aa, Homo sapiens
  MOD_RES (267): Variable amino acid
  MOD_RES (270): Variable amino acid
  MOD_RES (272)..(274): Variable amino acid
MLVLLGRQLRRPVKRRGTGPPGRESQATHFRVRSPGRATSSPDPDRPSGPRSPVWLPQAWTSLASLPTHSLPPVSLPLPQHRGSPTSLVPYYSEEELMGKTVVVLCNLQKAKMRGETSECMLLCAETDDGSESVLSDGDVVSPSDLILRFFDTYSHGRQRLTRRFDHQFTLFNGQCQWRFNADRFGVIERSGHQYALAEHLAGKVIADFVINKLNRHQHPFTTRFLYQIGIFPRQLTETVQQHIAFLLSLSRKAHSLESQGRRGWPXDTXGXXXKGHSIFSALLAERRAVEPNMQLSLQQGQNPMDGK

SEQ ID NO: 1929 - DNA, 2580 bp, Homo sapiens
  source (1)..(2580)
  CDS (201)..(258)
  CDS (930)..(1053)
  CDS (1380)..(1707)
  CDS (2219)..(2380)
  modified_base (175)..(184): a, t, c, g, unknown or other
  modified_base (719)..(728): a, t, c, g, unknown or other
  modified_base (2349)..(2358): a, t, c, g, unknown or other
catgtttctcatctgctctatgaaaagcaacgtgaagctctgtgagttgaacacaaacatcacagagaagtttctgagaatgcttctgtttagtttttatgtgaagatattcccttttccaaagacatcttcaaagaggaccacacatccacttgcagattccacaaaaagagannnnnnnnnncctgaaatctctccaaatgtccacttgcagaccctacgaaaagcatgtttctcatctgctctatgaaaagcaacgtgaaactctgtgtgttgaacacaaacatcacagagatgtttctgagaatgcttctgtttagtttttatgtgaagatattcccgtttccaaatgacatcttcaaatagtaccacatatccacttgcagattccacaaaaagagagattcaaaactgctctacccataggagggttcaacgctgtgagttgaatgcaatcgtcacatatatgtttctgagaaggcttctgtctagattttatttgaagatgtacccgtttcgaacgaaggccaaagattggtccaaatatccacttgcagatcctacaaaaagagtgtttcaaagctgaactatcaaatgaagggtcaactctgttatttgaatgtcacaacatcacaatatgaattttgtgagaatgcttccgtttagttaggtgcagttatcccgtttccaacgaaatcttgatcctctagtagtcgtannnnnnnnnnactagtatactacattcgactagtgatctgatcacgtagtacgtcagctatcgcatcgacagtactgcagtatcgtcgtgatgtagacgagtcgtaggatcgtcgtatcatgtcgtagtgtcgtagcagtctagtcactcgatccgtctatagatcgtcagtcactagtcgcgtagttcgagtcgatacgtgccctatcagcgacgactagtctacaatcgtcgatagacgtatactatcgagcacagagctatcgagtagagtcgacgatcgatactagtcaagtagactatcatatactcgactcgtcggtaatctactcgacgtactagtacagtacagagcacagcactgacgatagtcagtcgactcgacacgcacgtacgtcatcagatcgactgatatacatcagtctcggtagatccgcgagtcagtcgatagctagcagtcagcgtacagcgagtaccgtcatcatctctatcagagtacagtagcttacatacactacactagagcagtcatcacgtacgtcatccggtgtcacgcaccattcgtacacagtagctcgctcacgtatctccgatcgtaacactagtcccctatcgagcgagtcagcagagtctgaacagatcgaccgtagtcactagatagatcgcgactacagacagtatcagtcaagagatcagctagtcatcgactcctcgagtcctcgcaagtatatatagtcgacacatctagcatcagtctctcttcatcggatcgcaaactcacacacacgtacgcacagctctctagtcgttatatcaccagtatcacgcagcagtcgagctatcgacataggtctctcgtagtcttctcgatgacagagctcgtagtcgtcatcagcacagcacatacaagttcatccgaggccgacagagcatatagtgtcagtatcgatcgtcacagaatactagtcgctgtgtcagttacgtcgatcgtatgtgcgatacgtgcgtgtgcgtgcgtagcaacacacggtgtcagtctatcgatatcatctgagctcgtctagacagtagtcgacagcgtacgcaactcactagtagtagtcgtcgatcgtcagtgtcagagtacacagcgtacgtatcacacagtgtctgcgtagtcagtcatgagtctctagtcgctcaagcagtgagcgtagagcgtccgagtagatagtagtatcagatgctctgtcagcacatactccgtagtagagatcgtgtagcgtaacgtactgcagcgtcgtatagcagcactagtactgatgtgcactgcagagctgctgtactactctgtcacgtcgtgcagctgtagtagtactagtcacgtagcagtcgtgctacagatggcatgcagagcgatcgcagcagcagctatcgtagtcaagtagtagtagcgtcgcagcgatgactgcgcagtcatagcagcagctatgattatgctgctacgacagcttctgctagtacagccctatcagcgatgtgcagcagactgagacgacgacgcgcgtattgatgtcgtcgactgcttccgatgatgacgtcagcatcgacgagcgaatcatagggtacgtcgtaagtacgacatcgtatgnnnnnnnnnnagtgttcaacgctgtgagttgaatgcaatcatcacagagaagtttctgagaaggcttctgtctagattttatttgaagatgtacccgtttcgaacgaaggccaaagagtggtccaaatatccacttgcagatcctacaaaaagagtgtttcaaagctgaactatcaaaggaagggtcaactctgggatttgaatgcaaacatcacaaagaattttgtgagaa

SEQ ID NO: 1930 - protein, 223 aa, Homo sapiens
  MOD_RES (214)..(217): Variable amino acid
MSTCRPYEKHVSHLLYEKQPTTSLQSSIDVYYRAQSYRVESTIDTSQVDYHILDSSVIYSTSRLQTVSVKRSASHRLLESSQVYIVDTSSISLSSSDRKLTHTYAQLSSRYITSITQQSSYRHRSLVVFSMTELVVVISTAHTSSSEADRAYSVSIDRHRILVAVSVTSIYSPISDVQQTETTTRVLMSSTASDDDVSIDERIIGYVVSTTSYXXXXVFNAVS

SEQ ID NO: 1931 - DNA, 1330 bp, Homo sapiens
  source (1)..(1330)
  CDS (201)..(1130)
taaagagagcgttgaacttacccattagcatgccatggtgatttctggcttgacactggtcacagcaattaaaagtaaaaagaatgtcacagcacatacacaaatcaggtgcatatagaatttaaggtcaggatattcaagcaatcacaaccagtgatattacaccagcattttaaaaatttctttttgtctgttcagacatgataacttttctgcccatcattttttccattctaatagtggttacatttgtgattggaaattttgctaatggcttcatagcattggtaaattccattgagtggttcaagagacaaaagatctcttttgctgaccaaattctcactgctctggcagtctccagagttggtttactctgggtattagtattaaattggtatgcaactgagttgaatccagcttttaacagtatagaagtaagaattactgcttacaatgtctgggcagtaatcaaccatttcagcaactggcttgctactagcctcagcatattttatttgctcaagattgccaatttctccaaccttatttttcttcacttaaagaggagagttaagagtgttgttctggtgatactattggggcctttgctatttttggtttgtcatctttttgtgataaacatgaatcagattatatggacaaaagaatatgaaggaaacatgacttggaagatcaaactgaggagtgcaatgtacctttcaaatacaacggtaaccatcctagcaaacttagttcccttcactctgaccctgatatcttttctgctgttaatctgttctctgtgtaaacatctcaaaaagatgcagctccatggcaaaggatctcaagatcccagcatgaaggtccacataaaagctttgcaaactgtgacctccttcctcttgttatgtgccatttactttctgtccataatcatgtcagtttggagttttgagagtctggaaaacaaacctgtcttcatgttctgcgaagctattgcattcagctatccttcaacccacccattcatcctgatttggggaaacaagaagctaaagcagacttttctttcagttttgtggcatgtgaggtactgggtgaaaggagagaagccttcatcttcatagattcacaagagcagcattgtgtatcttctagcagaaaacaaacgtgttatatgaagcattttatatttcttactgtgttttctgtaatgtatgtatatgaataactttcaagcatgtacctagaaaagtcttttacctaacgttagtctaaaaaagtgcgtatgtatatatatgtatttttgtgtgtatgtttgtatgaa

SEQ ID NO: 1932 - protein, 309 aa, Homo sapiens
MITFLPIIFSILIVVTFVIGNFANGFIALVNSIEWFKRQKISFADQILTALAVSRVGLLWVLVLNWYATELNPAFNSIEVRITAYNVWAVINHFSNWLATSLSIFYLLKIANFSNLIFLHLKRRVKSVVLVILLGPLLFLVCHLFVINMNQIIWTKEYEGNMTWKIKLRSAMYLSNTTVTILANLVPFTLTLISFLLLICSLCKHLKKMQLHGKGSQDPSMKVHIKALQTVTSFLLLCAIYFLSIIMSVWSFESLENKPVFMFCEAIAFSYPSTHPFILIWGNKKLKQTFLSVLWHVRYWVKGEKPSSS

SEQ ID NO: 1933 - DNA, 1345 bp, Homo sapiens
  source (1)..(1345)
  CDS (201)..(1145)
cagaattatagtaaaaataggcaaagacttccttaagtatatgagactctatccaacagcagaaggttctgatcaagactggaagtgcaataaaagcaatgaagataagtatcagatatgaatgctcttctgcaatggtttgattgtaaatttattaatgatacaaagtattaaaaacttggatttttttgtctctggagatggccaccgaattggacaaaatctttctgattctggcaatagcagaattcatcatcagcatgctggggaatgtgttcattggactggtaaactgctctgaagggatcaagaaccaaaaggtcttctcagctgacttcatcctcacctgcttggctatctccacaattggacaactgttggtgatactgtttgattcatttctagtgggacttgcttcacatttatataccacatatagactaggaaaaactgttattatgctttggcacatgactaatcacttgacaacctggcttgccacctgcctaagcattttctatttctttaagatagcccacttcccccactcccttttcctctggctgaggtggaggatgaacggaatgattgttatgcttcttatattgtctttgttcttactgatttttgacagtttagtgctagaaatatttattgatatctcactcaatataatagataaaagtaatctgactttatatttagatgaaagtaaaactctctatgataaactctctattttaaaaactcttctcagcttgaccagttttatccccttttctctgttcctgacctccttgctttttttatttctgtccttggtgagacatactagaaatttgaagctcagttccttgggctctagagactccagcacagaggcccataggagggccatgaaaatggtgatgtctttccttttcctcttcatagttcattttttttccttacaagtggccaattggatattttttatgttgtggaacaacaagtgcataaagtttgtcatgttagccttaaatgcctttccctcgtgccactcatttattctcattctgggaaacagcaagctgcaacagacagctgtgaggctactgtggcatcttaggaactatacaaaaacaccaaaccctttacctttgtagacagactttccagaagcttttctaagagaataactcaacaaggagcatttggggatcacttccccctgttttttttttttttttctactgggtttctctaagtattttggaacataaatgaaatcctaccaggttgcttttgatggtaattcacacattgccggtcgataccattttaaaagtaatcatttttgtttgga

SEQ ID NO: 1934 - protein, 314 aa, Homo sapiens
MATELDKIFLILAIAEFIISMLGNVFIGLVNCSEGIKNQKVFSADFILTCLAISTIGQLLVILFDSFLVGLASHLYTTYRLGKTVIMLWHMTNHLTTWLATCLSIFYFFKIAHFPHSLFLWLRWRMNGMIVMLLILSLFLLIFDSLVLEIFIDISLNIIDKSNLTLYLDESKTLYDKLSILKTLLSLTSFIPFSLFLTSLLFLFLSLVRHTRNLKLSSLGSRDSSTEAHRRAMKMVMSFLFLFIVHFFSLQVANWIFFMLWNNKCIKFVMLALNAFPSCHSFILILGNSKLQQTAVRLLWHLRNYTKTPNPLPL

SEQ ID NO: 1935 - DNA, 1120 bp, Homo sapiens
  source (1)..(1120)
  CDS (201)..(920)
  modified_base (84)..(183): a, t, c, g, unknown or other
aatgaaatttggagtcaggcaaatctgacgtccaatcctgtctgccactacttagctgttacagactctcaagttttattctgnnnnnnnnnnnnnnnnnnnnnnnnnnnnnnnnnnnnnnnnnnnnnnnnnnnnnnnnnnnnnnnnnnnnnnnnnnnnnnnnnnnnnnnnnnnnnnnnnnnngctacttgtaggtcaccatgttattattatattggtattcaactgtgttgaatccagctttttatagtgtagaattaagaactactgcttataatatctgggcagtaaccggccatttcagcaactggcctgctactagcctcagcatattttatttgctcaagattgccaatttctccaaccttatttttcttcgcttaaagaggagagttaagagtgtcattctggtggtgctgttggggcctttgctatttttggcttgtcatctttttgtggtaaacatgaatcagattgtatggacaaaagaatatgaaggaaacatgacttggaagatcaaattgaggcgtgcaatgtacctttcagatacgactgtaaccatgctagcaaacttagtaccctttactgtaaccctgatatcttttctgctgttagtctgttctctgtgtaaacatctcaagaagatgcagctccatggcaaaggatctcaagatcccagtaccaaggtccacataaaagttttgcaaactgtgatctccttcttcttgttatgtgccatttactttgtgtctgtaataatatcagtttggagttttaagaatctggaaaacaaacctgtcttcatgttctgccaagctattggattcagctgttcttcagcccacccgttcatcctgatttggggaaacaagaagctaaagcagacttatctttcagttttgtggcaaatgaggtactgagtgaaaggagagaagccttcatctccatagattcagaagaggggcattgtgtgtcttctagcagaaaacaaactggtggtgtatgaaacattttatatttcttacagtgttttctgtaatgtatgtgtatgaataatttccaaacatatacctagataaatctttaacctagtctaaaaaatgtatgtatgtgtgtgtgt

SEQ ID NO: 1936 - protein, 239 aa, Homo sapiens
MLLLYWYSTVLNPAFYSVELRTTAYNIWAVTGHFSNWPATSLSIFYLLKIANFSNLIFLRLKRRVKSVILVVLLGPLLFLACHLFVVNMNQIVWTKEYEGNMTWKIKLRRAMYLSDTTVTMLANLVPFTVTLISFLLLVCSLCKHLKKMQLHGKGSQDPSTKVHIKVLQTVISFFLLCAIYFVSVIISVWSFKNLENKPVFMFCQAIGFSCSSAHPFILIWGNKKLKQTYLSVLWQMRY

SEQ ID NO: 1937 - DNA, 916 bp, Homo sapiens
  source (1)..(916)
  CDS (201)..(716)
tgaggtagatttttcttctttttcttaaggctgcgaatacgcgaaggtgagtttgctggggcccgttattggggcaagatataaatatgccatgagatcaaaaggacagctggaagaaccaagggcagctctgatgacttttgggccagcaggctcttgtggcctttcctctatggagctgccagtggtcttcagtttccatgtttttttttttttttttttttttttttttgagacagagtctcactctgccgctcaggctggcgtgcagtggcgcgatctcagctcactgcaacctccacctcctaggctcaagcgattttcttgcctcagccaccccagtagctgggactacaggtgcccaccgccatgcttggctaatttttgtgttttcagtagagacggggttttgccatgttggccaggctggtctagaacttctgacctcacgtgatccacccgcctcggcctcccaaagtgctggaattataggcgtgagccactgcacctggctaagtttgcatgtctttttgttccaagtctcaaaaatcaggaaagagaatctgatcggcccatgttgggacaagggttcacttggtcaaatgtggctggtgaaaatgtggcaactgggtcctcaaggacagaggacagcatggctaccggtcgcccatcccagtgtcttcccaatgatcctggagaacgaggagtcactctgagtgggaccacaacctccataaggatccagggtactggatgaaggtgtccctttagcggctgatccagaaccctccattgtaccataagaactgcaaatgctttgatcttagctttacacaaacatgctatttctttttactcatttggaaaaaaacaattattgtggccttacttggtgcacaggtgctggtatagatgt

SEQ ID NO: 1938 - protein, 171 aa, Homo sapiens
MFFFFFFFFFLRQSLTLPLRLACSGAISAHCNLHLLGSSDFLASATPVAGTTGAHRHAWLIFVFSVETGFCHVGQAGLELLTSRDPPASASQSAGIIGVSHCTWLSLHVFLFQVSKIRKENLIGPCWDKGSLGQMWLVKMWQLGPQGQRTAWLPVAHPSVFPMILENEESL

SEQ ID NO: 1939 - DNA, 1042 bp, Homo sapiens
  source (1)..(1042)
  CDS (201)..(842)
aattagccgggtttggtggtggatgcccgtaatcccacctactagggaggccaaagcaggagaatagcttgaacccgggaggtggaggttgcagtgagccaagatcatgccactgcactccagcctgggcaacagagtgagactcagtctaaaaaaataaaaaataataaaaaataaggaaactgaggctcacagaggggatgtcaatggtcaagattcacagtgagcacagggcagagccaggcctggctcccaggtccacccgctcatacaacaggctcttggccccagctcccactttttttttgagacggagtctcactctatcccccaggctggagtacaatggcacaatctcagcccactgcaacctccacctcccaagttcaagtgattgtcctgcctcagcctcccgagtagctgggatcacaggcacccaccgccatgcccagctaatttttgcatttttagtagagatggggtttcaccccattggccaggctgatctcaaactcctgacctcaggtgatccacctgcctcggcctcccaaagtgctgggattacaggtgtgagccactacgcctcccaactcccacttctaagaggttattccccgggactcccatcctccagggcctgcccctggcttgtaccagccagaaggaaaagaatgccagcctgggagctggggggccagggagtcaggggatctgggagttgggggacctgcaagctgggggccctggtttctgaccccagctcagctctgttgctcacaagcttgagaaccctggacaggtctctctacctcttcatctaccaagcaacaaggatgtattaggtgggatccttctaggtcaaatgtctagagacattttggtcatcaagattaccagtgggcgctccttgcatggagtgagcagaggccagagatgctgctcaacaccctgcaatgcccaggacagaccctatgccagagaatgacctggccccaactgtcactgctatactctcttataaggtactgatgctgagaaaccg

SEQ ID NO: 1940 - protein, 213 aa, Homo sapiens
MSMVKIHSEHRAEPGLAPRSTRSYNRLLAPAPTFFLRRSLTLSPRLEYNGTISAHCNLHLPSSSDCPASASRVAGITGTHRHAQLIFAFLVEMGFHPIGQADLKLLTSGDPPASASQSAGITGVSHYASQLPLLRGYSPGLPSSRACPWLVPARRKRMPAWELGGQGVRGSGSWGTCKLGALVSDPSSALLLTSLRTLDRSLYLFIYQATRMY

SEQ ID NO: 1941 - DNA, 1105 bp, Homo sapiens
  source (1)..(1105)
  CDS (201)..(905)
acacacacacacacacacacacaaaccacaaatcatcctcatctttcctggtataagaacatattttttttttgtaagtgtgtgtatcaggagtctgaggagactttatctggattcattgtctggcttaggactttcacaggctacagtaaaattatctgccatgctatggtcatctcaaggcctaactgggacagcatatgtctctaagctcactctcaggctacttccagaatctatatctcttggtggtagctggactaagggcttttgttctagcctctgcctctataaggaaactcacaacagagagatttactttattaaaatcatcaatcaagaaagagccagagcatgctcatgagatgaaagataaggaatcaagtaaaaagatggtgtccttgctgggtatgatggtgcacatcattgatcctagcatgttggaggcagaggcagaggcagaggcagaggcagaggcagaggcagaggcagaggcagaggcagaggcagaggcagaggcagaggcagaggcagaggcagaggggcagagaggcagagaggcagagaggcagagaggcagagaggcagagaggcagagaggcagagaggcagagaggcagagaggcagagaggcagagaggcagagaggcagagaggcagagaggcagagaggcagagaggcagagaggcagagaggcagagaggcagagaggcagagaggcagagaggcagagaggcagagaggcagagaggcagagaggcagagaggcagagagggaggcagaggcagaggcagaggcagaggcagaggcagaggcagaggcagaggcagaggcagaggcagaggcagaagcagaggcagaggcagaggcacctggatctctgtgagtctggggttatcttgatggatggtgagttccatatcagccagggctatatagtgagatcctgtctcaatttttttcctcttaaccaaaatgactggtacattctaaagaagaaaactgggattcctatcctacaacacatgtaaaaatgaactcaaaatggctaaatacaaacatttgaaagataaattttcgatgccttttctgtgtctatgttt

SEQ ID NO: 1942 - protein, 234 aa, Homo sapiens
MSLSSLSGYFQNLYLLVVAGLRAFVLASASIRKLTTERFTLLKSSIKKEPEHAHEMKDKESSKKMVSLLGMMVHIIDPSMLEAEAEAEAEAEAEAEAEAEAEAEAEAEAEAEAEGQRGREAERQRGREAERQRGREAERQRGREAERQRGREAERQRGREAERQRGREAERQRGREAERQRGREAERQRGREGGRGRGRGRGRGRGRGRGRGRGRGRSRGRGRGTWISVSLGLS

SEQ ID NO: 1943 - DNA, 853 bp, Homo sapiens
  source (1)..(853)
  CDS (201)..(653)
  modified_base (264)..(363): a, t, c, g, unknown or other
acagtgctacagtaaccaaaaaaaaaaaaaaaaaaaaaaaaaaaaaaaaaaaattcttggtcctggtcccaaaacagacttccagaccaagggaatggaacaaaaacctaaaaaacaatgccacacatttataaccatttgattttcgacaaacctgacaaaaacaagctttgggaaaaggattccctgtttaataagggatgctgggaaaactggctagccttatgcaaaaaactgaaactggaccccttccttacaccttannnnnnnnnnnnnnnnnnnnnnnnnnnnnnnnnnnnnnnnnnnnnnnnnnnnnnnnnnnnnnnnnnnnnnnnnnnnnnnnnnnnnnnnnnnnnnnnnnnnagtctttaacagatactgcccgtatacctaggatttgcctaaaacagtgggttttgttgttgttgttgttgttgttgttgttgctgttgttcttttttttgagatggagtctcactctgtcacccaggctggagtgcagtggcgtgatctccgctcactgcaagctccgcctcctgggttcacgccattcttctacctcagcctcccaagtagctgggactacaggcgtccaccgtcacgcccggctaaatttttgtatttttagtagagacggggtttcaccatgttagcaggacggtctcaatctcctgacctcgtgatctgcccacctgggcctcccatagtgctggggtttacaggcatgaaccaccatgcccggccaacagtgcttttaaatatttaagataatagtcaacttttaaaactatgtagattttacatgaaaataatttttttctgcatctcatttttttgttgttgttgttagaaa

SEQ ID NO: 1944 - protein, 150 aa, Homo sapiens
  MOD_RES (22)..(55): Variable amino acid
MLGKLASLMQKTETGPLPYTLXXXXXXXXXXXXXXXXXXXXXXXXXXXXXXXXXXSLTDTARIPRICLKQWVLLLLLLLLLLLLFFFLRWSLTLSPRLECSGVISAHCKLRLLGSRHSSTSASQVAGTTGVHRHARLNFCIFSRDGVSPC

SEQ ID NO: 1945 - DNA, 1045 bp, Homo sapiens
  source (1)..(1045)
  CDS (201)..(845)
ttctgttgttttaaacggttggtgttgggatagaaaggcccatgggtctccttctgcctctgcgtcctggcttccacaatgcagacaaaacttaaaaattctcaggggcttctcattttagcgtgggtggcagaggcctggagaagcccgaggtcacttcagaccggccacctccttggaccttcccttcctgacataaaatgatgactgtaatggaggctctgcactcagcccgtggagacaggccagaagcgctttgctacagtactaatatagcgcacgttttgctcatgagacggcactcagaagttctcggcatgattagaaagtgtatcggtcagaatgcgctaggccatgctatggcaacaaacaggcccccagatctcaatggctgccagcaggatcagcaaatggtttctgtaaagagtgacgtgtacttttgttgttgctattgtttttggagacacagtctcactctgttgcccaggctggagtgcagtggcgcgatctcggttcactgcaacatccacctcccaggttcaagcaattctcctgcctcagcctcccgagtagctgggattacaggtgcccaccgccatatccagctaatttttgtatttttagtagagacagggttttgccacgttggccaggctggtctccaactcctgacctcaagtgatccacccgcctcagcctcccaaagtgctgacattacagttgtgagccaccgtgcccggctacttttaatatatattttaggctttgcaggccattcagtctctgtcgcaactcctcaactctgctattgtaacacaaaagcgtggcagacagcacaccaatgagtgggctgcattcctataaaatgatattgagaaattgcccacaggctggcgtctgctgaccgccagcttcagataaccaacgtttgtcttcttcttgtgccacacatgcaaggagtgagggcccgctccagacgtgctccagggacccaggctgatggaggatcgagtcccacccagacctccatcatcatggaggccag

SEQ ID NO: 1946 - protein, 214 aa, Homo sapiens [sequence omitted]

SEQ ID NO: 1947 - DNA, 877 bp, Homo sapiens
  source (1)..(877)
  CDS (201)..(677)
  modified_base (271)..(370): a, t, c, g, unknown or other
tagctactcaggaggctgaggcaggagaatcacttgaacctgggaggcagaggttgtagtgaagtgaacagagatagtgccactgcactccagcctgggtgacaagagcaaaactccatcaaaaaaagagagaaagaaaaagaaaaagaaagaaagaaagaaagaaaagaaagaagaaagaaagaagaaagaaagaaagaatgaaagaaagaaagaaagaaagaaagaaagaaagaaagaaagaaagaaagaaagagagaaagaaagaagnnnnnnnnnnnnnnnnnnnnnnnnnnnnnnnnnnnnnnnnnnnnnnnnnnnnnnnnnnnnnnnnnnnnnnnnnnnnnnnnnnnnnnnnnnnnnnnnnnnnattgtgctttttggttttggggggttttttgaaacagggtgttactctgctgtccaggctggagtgcagtggcacaacctcggctcactgcaacctccacctcctaggctcaagcaatcctgcctcagcctcccaagtaaatgggactacaggcatgcaccgccacacccagctaatttttgtattttctgtagagacagggtgttgccattttgcccaggctagtctcgaactcctaagcgcaagcaatccatctgtcttggcctctcaaagtgctaggattataggcatgagccactgcacctgaccagtaatacatttgtgtatatatacatgggttaacataaaaatgtttgtgctatcagctgaaagggcataaaagaaatgacacctcagtagcaacaagcacacctaatgcctagatcttggtttctaatactgtcctccagtaaagaaagcaggaatctttgagaaatagttgattctaggactggagcaagaaatata

SEQ ID NO: 1948 - protein, 158 aa, Homo sapiens
  MOD_RES (24)..(57): Variable amino acid
MKERKKERKKERKKERKKERKKEXXXXXXXXXXXXXXXXXXXXXXXXXXXXXXXXXXLCFLVLGGFLKQGVTLLSRLECSGTTSAHCNLHLLGSSNPASASQVNGTTGMHRHTQLIFVFSVETGCCHFAQASLELLSASNPSVLASQSARIIGMSHCT

SEQ ID NO: 1949 - DNA, 874 bp, Homo sapiens
  source (1)..(874)
  CDS (201)..(674)
tatagttttaaactcagattgctcttttacccctagttcagggtttttactaaattctataaaacacaagagagggagccatggaatgacaaataggccctatcatgaggcaccaaactgctgaatcacataggcagtagagagctaattcattatctcagttagcataagggtttttatttttaaccaagggaaaaaaaatgaacaagctcacaaaaaaaccttcagaaaccctgaactactgcgtctcgtataaaaagaacaagtcattttgttttcatgaagcacctggaatatatgctcagagaagttcatggtgccaaagatatagagacaatgttttcaaagggtgggaagggcaggtgagagggaaaaaagagaaaggggaaggaggaaaggagggaaggaaggaaagaaggaaggaaggaaggaaggaaggaaaaggaatggaaggaaggaagggaaagaaggaaagaaacaaagaaagaaagagaaagactattcccttgagaaagaagataaacagaggaataccctggggcggcctcctcctcctagggatcaataggtcttcatctttgtctttcagaagctgctgtagaagagaaaaatatttctttcaaaaaataaatcacaaatactataaacatataaacctacatatgtactcataaaaattaagaataaatataaataaaaaccaaaaattaatacatcttttttattaacaaaaaaatctctagcaattgcttgtgaaatggtatctttaatgagtgaggtaattttgacagatagacatagtattctgcagaaactgaaaatattatatttcatgcaaatcaaaaccacaatgagataccatctcacactactc

SEQ ID NO: 1950 - protein, 157 aa, Homo sapiens
MNKLTKKPSETLNYCVSYKKNKSFCFHEAPGIYAQRSSWCQRYRDNVFKGWEGQVRGKKEKGEGGKEGRKERRKEGRKEGKGMEGRKGKKERNKERKRKTIPLRKKINRGIPWGGLLLLGINRSSSLSFRSCCRREKYFFQKINHKYYKHINLHMYS

SEQ ID NO: 1951 - DNA, 928 bp, Homo sapiens
  source (1)..(928)
  CDS (201)..(728)
agggccccccgcagccccaggtgagctagcccgagagcaagacctgcatgaggccggacagggaaagtggcctggggcgaacagaggcggggaggcggggctgagcgagcgagggggatcccccaggagcaggaggagctgggcaaggggggcggttgcggggaggggtggatggttcggaatgggcgtggtcttgccgaatgggagggtctaacgcgagtggttggcgtcccgcgcggggcccaaagtgtgacacgggtgggcttggaaccgggaccttagctactggtggggctgaagcccaccctgccattgttctgccacggtcagtggggcttgctcctccctatgggaagcacttacggccgggagcgggaatcccgtcaccaccgcggtggggaagccgcacggaaatccacggggtgcggacggtgccatctcctggaagttggccagagaaccccactctgtccgcaaatcgctcttatttaataacaactatcatcgattgtgatcctaacctgggcctcctgcctcccaggcaatacccttttccgcctggcgcggcctctctgactcgagtggggatggggagcaccttgtacatttcagaggatcctccgggcctacagggagaagggccatcaggcctcagctcccccagggtctctgccagttcttctctgcctgtagcccttatctggctgcagcctccacgccttccctgagcctggcaccctgttagcccagagtgttgtggtaactagacccggttgacagaggacatcatgcttctgggtcgtgagtggaccctgatatctcgagtctccttcttcaatagacccacaatgaggggcaccctccccctccacctcgcaacgaccatgcagggagtaccggctgaggtgcaagtggccaataggaacgg

SEQ ID NO: 1952 - protein, 175 aa, Homo sapiens
MGGSNASGWRPARGPKCDTGGLGTGTLATGGAEAHPAIVLPRSVGLAPPYGKHLRPGAGIPSPPRWGSRTEIHGVRTVPSPGSWPENPTLSANRSYLITTIIDCDPNLGLLPPRQYPFPPGAASLTRVGMGSTLYISEDPPGLQGEGPSGLSSPRVSASSSLPVALIWLQPPRLP

SEQ ID NO: 1953 - DNA, 1435 bp, Homo sapiens
  source (1)..(1435)
  CDS (201)..(1235)
  modified_base (1040)..(1139): a, t, c, g, unknown or other
  modified_base (1145): a, t, c, g, unknown or other
ctccatgttgtcatttaatccatgaagtagaccaacccagatgttgtcctcactctaaggactcagccctgttgcaagaagccaagtggcagccagaaagagggcggtgggagtgtgagcgcctgtccccatgtccggctgtatcgtgagggtcctggccgccagctcacctcatggcccggctcagcttctcgtaggtcatgttgctgttctttttcttttggccccatagttgggccacagcctcggagcgcaggaacttgaagacgccttcatgccgattctcccacttcatgaggccctcgttgagctccgggtggatgaggatgtcccggatgaactcccacaggtgggtgcctctgggcgctgcaaggccagcctccatcagtttgccatccaagtgtcccctctcacccaagggcagccagccctgcccgccccagtgcactgctgacttggccacagcatgcagcaagcctctccagagaccccgcagtgccctctgtgcgggtactgcagtgactgcttttctcctcagcccacctaagacccaccagctgcctcctcacattgagggtgtcccagagggcaggacagtggccaagtgcagagagaactggagtcagtggacaggacactggagtcagtggacaggactctggtaccatgagcctcccactgggagccttatttcctcctcctctccaggaccaccaagccaggctctgcaattaggtggtgaccgataccatagagcccccagcttgtgcacagccttaccaaaggccatgcggaggccagagaaaacgggagaagggatacctgcaacaacccgcagtgccccaggaagccgctcagcccggcgcagggaggacccacgtgcccccggagctcaccgtgcttgctcttcttgccctcgagacagtcccagtactctttgctcagctttcggggccggcctcgtttgcgcttcccgtgcttgggatcccccttcttgcagtcacgaaaaccatctgtggggactgtggtggaaggtcaannnnnnnnnnnnnnnnnnnnnnnnnnnnnnnnnnnnnnnnnnnnnnnnnnnnnnnnnnnnnnnnnnnnnnnnnnnnnnnnnnnnnnnnnnnnnnnnnnnntcgggncgccctcttggggacctccctcgactcaccgctggggaagagcttgccatcagtgggatccaggtccacgtcacttccaccggagtctgaggagtgggagctccgagaagcaccagtccctggggggcggggtcagagtaagtcccctgccggcccaccctctgctcaaccacgctgctggctctcaggacacacttcccagcctgttcctgttcctgccagaaggcctgagttatggtgctgggagccagagggaacaagggacacttcggggaagggaggttgtggcc

SEQ ID NO: 1954 - protein, 344 aa, Homo sapiens
  MOD_RES (280)..(313): Variable amino acid
  MOD_RES (315): Variable amino acid
MLLFFFFWPHSWATASERRNLKTPSCRFSHFMRPSLSSGWMRMSRMNSHRWVPLGAARPASISLPSKCPLSPKGSQPCPPQCTADLATACSKPLQRPRSALCAGTAVTAFLLSPPKTHQLPPHIEGVPEGRTVAKCRENWSQWTGHWSQWTGLWYHEPPTGSLISSSSPGPPSQALQLGGDRYHRAPSLCTALPKAMRRPEKTGEGIPATTRSAPGSRSARRREDPRAPGAHRACSSCPRDSPSTLCSAFGAGLVCASRAWDPPSCSHENHLWGLWWKVXXXXXXXXXXXXXXXXXXXXXXXXXXXXXXXXXXSXRPLGDLPRLTAGEELAISGIQVHVTSTGV

SEQ ID NO: 1955 - DNA, 1054 bp, Homo sapiens
  source (1)..(1054)
  CDS (201)..(854)
cccactaattccacatttgatgtcatttctgggtcccttttgggtgactgatttttctccttaagttaaatatttcttgttccttgtttgtctagtaaatttataactgggtgtcagacattgtgaattttacctggtgctggatgtttttgtcttctgttaaatattcttgaacttttttctgggatgcaattaaatttatggtgagcactttgttctttcatgtcttgcatttaagctgggttaggtgggatcaaagcagtgttcagtttagagttaattttcttttactagtggacttcaccaaaatgaaaaacttttgctcctcagaaaacattctttttttttttttaagacggagtctcactctgttgcccaggctggagtgcagtggcacaatctcagctcactgcaacctccacctcccaggttcaggtgattctcacacctcagcctcccaagtagctggaattacaggtgcacaccgccatgcctggctaatttttgtatttttactagagacagggttttgccatgttggccaggctggtcttgaactgctgacctcaggtgatccacctgccttggcctcccaaagtgctgggattacaggtgtgagccatccaaaacctttttttttttttttttttgagacagagtctcacactgtcacctgggctggagtgcaatggtgcgatcttggctcactgcaacctccacccccgggttcaagcgattctcctgcctcagcctcccgagtagctgggattacaggcgcccaccaccacgcccagctaatttttttgttttttcgtagagacggggtttcactatgttggccaggctggtcttgaactcctgacctggtgatccgcctgcctcggcctcccaaagtgctgggattacaagcgtgagctgcccacccagcccagaaaacattcttaaaaaatgaagacaagccacagactggagaaaatagtttgatgatatacatgtgaaaaaggacttgtatccataatatgcaaagaacccttaaaacccaataataataaaa

SEQ ID NO: 1956 - protein, 217 aa, Homo sapiens [sequence omitted]

SEQ ID NO: 1957 - DNA, 868 bp, Homo sapiens
  source (1)..(868)
  CDS (201)..(668)
  modified_base (223)..(322): a, t, c, g, unknown or other
tcattccaaccctggccccttccaaatctcatatcctcacatgtcaaagccaatcatgcctttgcaacagtcccccagtcttaactcatttcagcattaactcaaaagtccacagtccaaagtctcatctgagacaaggcaagtcacttctgcctatgagcctgtaaaatcaaaagcaagctacttacttcctagatacaatggaggtacaggcattgggtannnnnnnnnnnnnnnnnnnnnnnnnnnnnnnnnnnnnnnnnnnnnnnnnnnnnnnnnnnnnnnnnnnnnnnnnnnnnnnnnnnnnnnnnnnnnnnnnnnnggagtgcagtggcatgatctcggctcactccaaactttgcctcccggattcaagtgattctcctgcctctgcctcccaagtagctgagattactggcatgcaccgtcatgccctgctaatatttgtatttttaatagagacagagtttcaccatgttggccaggctggtttcaaactcatgacctcaggtgatccacccgcctcggcctcccaaagtactgggattacaggtgtgagccaccacgcccggccaacattactttcaaaaacaataagacaaagcttttcggctatatgtatcctctcagattttctagaagaaaattatattgtttgcaaacaatgacagttttgtctctttctttataatatttatacatttttctttctctttcacattgactggaacctccaagaaaatgttgacaagaagcagtgttattgaacatcttgcttttgtttttgactttatagatactttcaccatctacataaaagtttccaacttttttttaccatgtcccacagcaaaaaacaaacagaaaa

SEQ ID NO: 1958 - protein, 155 aa, Homo sapiens
  MOD_RES (8)..(41): Variable amino acid
MEVQALGXXXXXXXXXXXXXXXXXXXXXXXXXXXXXXXXXXECSGMISAHSKLCLPDSSDSPASASQVAEITGMHRHALLIFVFLIETEFHHVGQAGFKLMTSGDPPASASQSTGITGVSHHARPTLLSKTIRQSFSAICILSDFLEENYIVCKQ

SEQ ID NO: 1959 - DNA, 1737 bp, Homo sapiens
  source (1)..(1737)
  CDS (201)..(377)
  CDS (872)..(1537)
  modified_base (1265)..(1364): a, t, c, g, unknown or other
ggacaaaaaggaaacagaatggggggctggggtcaaaatgtgccaaaatcaaatcaggcacagaagcacagtgctggctgagcccttggccagctctctgggaggggacactcctggcactataagggatccacaagtgccctttaaagctgggtcctaaaagggccctggaagggccaggccttgtaagtcctcccaacatgctggtggcccggagacagcaaagagtggagaagggagaaagcggggatggctccgaactgcctcttctcccccccagactccagcacttgcacaaccaactaaacacacccagacacatggcctcattgtctgatacacaggaaggcacacacatctgtacacacaggttcgtggttaggtgcactgatgcacacagcctcattgtatacaatttacacacacacacgccctcccagtagatgtatacaacacattcaatccgccagttgggtggtgtagtcacacaatcatacacactcacaaactctgtcaggagtgaacaggcatagaacctctccaggctcatgctcacgcacacacattccacaacccctcagtcaggcccatacaaacctctaatacacacaacacaaactcacagcctgtcaggaaaaaaagcactcacaacatctccgttaggtgcgcaaacccttacaatctcacaacctctctgtgaggtgcacacatatccttacaatcactctgtccgcgtgtgcacacacacatacaagtgcacacacttagaacctctgtgttaggtgcacacacaggctcacaacttctctgcgggcgtgcgcgcacacaaactcacaacctcccggttagatgcacacacactcgctcccagtctctccgccagcccctgcacactcacactggctcagtcggcacacgcactctggcagcctcgctctcctccgggcgcaccccacacccacgcaccctccgggccctgtgcacccctcccccaggcccatgccggcgcccggcagtgaactccagcggcgcggggtgtgcgctcgcccccagcccgcggccgcctgcgcccctcctcacctttctcgcccgcgcccggcaaccggccctcgtcctccttggggttggtcacctgggtgatgatggccgggccgtcctgggtgccggcgcggcggccgcccgcaggcccggccccccgcaagccaagcgcgcgggggcgcggcgcggggggcgcgggggcgcggcgcgggggggcgctcgcagcnnnnnnnnnnnnnnnnnnnnnnnnnnnnnnnnnnnnnnnnnnnnnnnnnnnnnnnnnnnnnnnnnnnnnnnnnnnnnnnnnnnnnnnnnnnnnnnnnnnnctgtttcgttttgttttaatgagaagagtaaaatagaagagtttctgcttgcaacattctgcttcaaacaggcatcagctctcatgcatactcacagatgttttgggattaattgtgaagatgtcatccaattgtatgtttgtgttgttcccttcctgctatcatggctctgatagcctaaatgagtgatttaatactgtgtgaattttgcattggtttataagtgtgttgtttcattaaaaaaaaaaaacagagaaaagcaaggaatacttagaaagcttctttgtatcaactgacagttaatcattcagatggaaatatgcacgttaaaatgtcattgctgacagcctatagtttttagctgtacaatttg

SEQ ID NO: 1960 - protein, 280 aa, Homo sapiens
  MOD_RES (191)..(224): Variable amino acid
MLVARRQQRVEKGESGDGSELPLLPPRLQHLHNQLNTPRHMASLSDTQEGTHICTHRFVSLRQPLHTHTGSVGTRTLAASLSSGRTPHPRTLRALCTPPPGPCRRPAVNSSGAGCALAPSPRPPAPLLTFLARARQPALVLLGVGHLGDDGRAVLGAGAAAARRPGPPQAKRAGARRGGRGGAARGGARSXXXXXXXXXXXXXXXXXXXXXXXXXXXXXXXXXXVSFCFNEKSKIEEFLLATFCFKQASALMHTHRCFGINCEDVIQLYVCVVPFLLSWL

SEQ ID NO: 1961 - DNA, 16554 bp, Homo sapiens
  source (1)..(16554)
  CDS (201)..(481)
  CDS (8090)..(8178)
  CDS (10566)..(10637)
  CDS (16134)..(16354)
aatggtgtcattcaccttgatgaggggtcagggtagcggatggtgcgagcatcatgagtcaccagatgagggattccttttgtgcccacaaagatttttctcactttgcacaacttgtacttggtctcctcaggtgtacagcaaagcaacctttggtgtcacggatcagatggaaattctctcctgtcttgtcaatgctgatgacatccatgaacccagcagggtatgttatatcagttcggaccgtgccatcgatctcaatgaaccgctgcatgcaaatcttcttaagtctgttccttaggaaaatgatgaggggaagacactctctcaacttgtggggactggtggacggacgaggagcaaacacaccggtcaatttatccagcatccaatgctttggagctgctacccgcttcagatgcttcttggcaccacgagccatggctgcattaggcaaggaaaagaggacctttgtcttccggtgcacatagcgaaagtttcttaacagcaatttggttgcccaggttctgtgatacctggaaggaagggagtgccctggataccaaacacaaatactgtagtcactggatagatacatcccattaaagtgagtaacttggccatgagttcatggatagatacgtcctcattaaagtgagaaacttggccgtgagtttgtggatagatacatcctcattaaagtgagaaactcggccgttgaggtcgtggatagatatatcctcattaaagtgagaaactcggcagggagttcgtggatagatacatcccactaaagtgagaaactcggccgtgagttcttggatagatacatcgcactaaagtgagaaactcggcagggagttcgtggatagatacatcccactaaagtgagatactcggccgtgagttcgtggatagatacatcccactaaagtgagaaactcggcagggagttcgtggatagttacatcccactaaagtgagaaactcagcagggagttcgtggatagatacatcccactaaagtgagaaactcagccgtgagttcgtggatagatacatcccactgaagtgagacactcggccgtgagttcgtggatagatacatcccactgaagtgagaaactcggccgtgagttcgtggatagatacatcccactgaagtgagaaactcggccgtgagttcgtggatagatacatcccactgaagtgagaaactcggccgtgagttcgtggatagatacatcccactgaagtgagaaactcggccgtgagttcgtggatagatacatcccactgaagtgagaaacttggccgtgagttcgtggatagatacatcccactgaagtgagaaactcggcagggagttcgtggatagatacatcccactaaagtgagaaacttggccgtgagttcttggatagatacatcgcactaaagtgagaaactcggcagggagttcgtgggtagatacatcccactaaagtgagacactcggccctgagttcgtggatagatacatcccactgaagtgagacactcggccgtgagttcgtggatagatacatcccactgaagtgagacactcggccgtgagttcgtggatagatacatcccactgaagtgagaaactcggccgtgagttcgtggatagatacatcccactgaagtgagacactcggccgtgagttcgtgtgccctgctctttcagggtctgatcaccctaggtgaactcatacaggttatgacctgcacagctcaattccacacctatgatcctgcaagccttacctggatcttagctataaaaagcctctttcatggggacttccccatcaagccttctctcctataacctccaaacaatctctgtttccaatgaattaaaaaaaaaaaaaagtttaagaccaccaccactttaccaaatacttaaatttggggcaaaaaaaataaaaataaataaatcaggagtggtataataaattagatatagaaggctgaagattggccctgtaacctgatcacccacttgcaactctgaaatcagcatcctttttcctacaaaaaaatctctgtatctcttccagcgtttttagcttcactctaacatagggagtctttatttatttatttatttttttattttttgagatggagtttcgctctgtcgcccaggctgtagtgcagtagtgcgatcttggttcactgcagcctccacttcccaggcaagcgattctctgcctcagcctccagagtagctgggattacaggtgtgctccacgacgcctggttaatttttgtatttttagtagagacacggttttgccatgttggccaggctggtcttgaactcctggcctcaagtgatcccccctccttggcctcccaaactgctgggattacaggcatgagccaccgtgcccggctgcatcaggggtctttaaccactgtgttcaaagtcacatcatctatgactcttcctggtccctgcatcaagtcctaaatattctccctctgcttcatctcaagactctatcccttctctctatgtcctaaatattctccctctgcttcatctcaagactctatcccttctctctatgtcctaaatattctccctctgcttcatctcaagactctatcccttctctctactccttgttcaggccctcactgctctgcactggagctgactggtctctttattcccaggatctcccgtcactccccatcccacagcctgtgtttctctagacaaactgaaccactgatttttccctaaacaaagccatcaatggcagggcacaccaggggtactcaggtcaaacctacacgagatcatctgcgagacagaaggcccatggttgattcgcctcaactgacttacacgagaccacctgtgagacagaatgcccatagttgatttgcctcaactgttgcccacaggctgcgaaaacgggtagagcatgaaatgggaggttgtagagtcagacagatctagggctgaaccccagctctaccactcaccaacgatgcatcctagaacaagtttctcagcctcactgagtctcagttttctcatctataagatgggtaatcgcaaagataataatgaacataaatcctagttcataaggttgtggtgagggctaaattagagtgctgacacaaaggaaccagcacactgctggcactgaaagagctcaacaaagatcacttctcccctcactcccacctcttcctcccttcagcacagcactgtccaggaaagcaagctgctttaaaataagacatctcataacttgggagtaaactgtcactgcaaaccccctcggttggaagaggaagcatactccagaacacagattagcatcataaggatatcaataaatgcaatcaactccagcaaaagcagcatcggatactctcgctgatcttcacgctttgagggcccctggtgctgctgggtgtggtgcacccttggggaaggacgagggcccctgggtgctgctgggtgtggtgcatccttggtgaaggacgagggcccctgggtgctgctgggtgtggtgcacccttggggaaggaccacagaaaatccaggtccctaggactatgctcagtgctcttcatacgtttaattctcacaacaaccctgtgaggcaaatgccattattcttattttacagttgaagaagctggaattctgagacaactgacagacaggacattattgagtctgaatctgaacccaggatccagcacttcccagcgcctcccatggaggaggagaaggtgaatgctggattctcggtcttcggggcaagcttctgagcacaacaccgggggacacaaatttgtcaggggagaactcaaccaaaaccacatacacagatcatgggcggggacatccctcctccctccatccctccctcctcccggctccaggaccattctcagcgtgcatcgagctacataccgtacatctcgatggagaaatgcatgataccaataccaagaaatgttagagaaaggaaaatccaaaatgactaggaaactattttcagaaaggagaaaaaaaaaagttgcagctgggcacagtggctcacacctgtaatcccagcactttgggaggccgaggcgggcggatcatgaggtcaagagattgagaccatcctggccaacatggtgaaaccctttctctactaaaaatacaaaaaattagccgggtgtggtggcaggcgcctgtaatcccagctacttgggcggctgaggcaggggaatcgcttgaacctgggaggcggaggttgcagtgagccaagatcgcaccactgcactccaaggctggcgacagagcaagactccatctcaaaaaaaaaaaaaaaaaaatacccaaaaaacaaaacaaaacaaaacaaaaaagttgcctatttaaaactagggctgcaaacacagggcagcagagatggtgagccaccactgaccagcagctccccttgaattgatctgaacgcattcatagggggcttgctttagagatgcagatgactctggttggcaggaggtgccattattagaaaaagctcattattagaatgcctagatgagaagctcacttcctcttttggtgcaaaaaggttaggaagaaaccagaactcaccatttgctctgatttttcagctttgtctttgatatctttgattttgccaaagagttgttggatagctttctgagcctcttcaagcgcctagagtaagggaaatacatgaaaaacaaaaagtggctagagacagctccagtcactaactgtaatcaatgctaggcacaaaagaaatttccatgaagctctcctgattcattgtacttatgccaacaatttttctggaccaaaatagtagagacctatagagtccagtggctgcgaacaggtaaacactcgggactcttaccaatgttcctcacaaagtttcaacttaaaactaaatgattcccctctacctcagtcattactgtacatgttattgataacagcaaataggacaagtagatctctgtgtgtgggtgtatgcaaagactcacacagagggacaggggtagctctaaattggggcaagggaaagctctggacttggaagttccagattgtgcattcaaaaaaacctgaaccgtgaatggggactccagaactgcaacaaatcttaaagactttcatagtaagccatttgaaaaccaatgaaatgcacttagaaaggaacactgggccggacacagtggctcacgcctgtaatcccagcactttgggaggccaaggcgggcagatcacgaggtcaggagatcaagaccatcctggctaacatggtgaaaccccatctctactaaaaatacaaaaaactagccaggcacagtggcacgcacctgtagtcccagctactcaggaagctgaggcagaagaattgcttgaacccgggaggcagagcttgcagtgagccgaaattgcgccactgcactccagcctgggtgacagagcgagactccaaaaggaaagaaaagaaaagaaagagaaagaatgaaagaagaagggagagaaagagagacaaagaaagagaaagaaagaaagaaagaaagaaagaaagaaagaaagaaagagaaagaaagaaaaaaagaaagagaaagaaagaaaaaaagaaagaaagagaaagagaaagaaaggaaggaaggaaggaaggaaggaaggcaggcaggcaggcaggcaggcaggcaggcagaaagctaatggtggctcacacctgtaatcccagcacttcagaggctgaggcaggaggattgcttgagcccaggagttcaagactagcctggggaacatggcaagactcggtctctgcaaaaaaaaaagttagccaggcatggtggcgcacaccagtagtctcagctacttgggaggctgaggtgggaagattacttgagcctgggaggtcaaggctgcagtgaactgtgatcatgccactgcactccagcctggtgactgagtgagatcttgtctcaaaaaaacaagcaaaaagctaatggtgagcccagcatttccactgaaataaaaacctacaaggacagatgctacacaatgaaagtattacaacacagctgcagcttctgctaggaggggaagcaacatgagggcagttgtgacatgtggagaccagaaagttcctgtgagtgccagcaggccacagacgtgtacagaccaaatgcactggaccgtccgtgagtaaagactacccacagctaaagtacctgtgagtgccagcagcccacagacgtgtatcgaccacatgcactggaccatccgtgagtaaagactacctacagctaaagtacctgtgagtgccagcagcccacagacgtgtatagaccacaggcactggaccgtccgtgagtaaagactacctacagctaaagtgtctgtgagcgtgtcagcaggccacggatgtgtatagaccacatgcactggactgtccgtgactaaagactatgaattcctgaggcagttatagttctaggcacgagtcagcatctccttaattcactccttcaatcactcaatgagtatttactgaatgcctcccatataccaggcatgattctaggcattgggaatccaatggtaaacaagacagtatggtctctctctctgtcctcaaggaatgaacttactttgagaagtaagggggaggagatcctggaaaaacaacaaaataaagaaacaagataattcccaagtgtggtgaattgacaggtgtggtgaaggacttatgcagtgatgagaataagggagatggtggtcacagaaggtctcctgagaaagggcacacaaatcgggacctgcaggatgaggaggtgtgagaatttgtagatttggagtaagatgattttttttttcttgagatggagtctcgctctgttgcccaggctagagttaagtggcgtgatctcagctcactgcaacctctgcctcccaggttcaagcaattctcctgcctcagcctcccgagtagctgggactacaggcacctgccaccacacctggctaattttttgtatttttagtagagacggggtttcaccgtgttggccaggatggtctcgatctcctgacctcgtgatctgcccgcctcggcctcccaaagtgctgggattacagacgtgagccgccgcgcccagcctggagtaagaggattttcagcagagagaaaagcaaatgtgaagatcctgacagagaaaagacctcggtgttttggaggtccgaaaagacagacagtaggtggtagtgcaatattgcagcgggaagtgtctggaaataatctggagaggtgggcacgagccagagcacggaggcctcaaagcataaggattctgctctaagtgccaatgagaagccactgaagggtctaaacaagggacagatgtatggcttacttgtataagactgtcctggctgctgtgtggcaaaggggctgtgcaggggcaggagggaaagcgggagtgaaagctctgtgagaagttgctgcagtgtccacgagacggtggaggcctagaagaggcagccggtgctgacgggaagacgccgagcgattcagggtttccaggaaggtacaatgtgtaggactcactgatggactgtgtgtgggtgatgagggagagggagaaccaaggatgacgcccgggttttggttgaaaagccaaggccagggttcactgactgaaccagggaatgcaggaggaggacgggcttgacaggcaggtgtgtgtggtggtggcggggctggaagtgaagagtcccatctgcaatacgttacgggtgcctgtgctatggctggaatgcatccccaaagttcatgtgttggaaacataatccccaatgcaatggtgttggcaggtggggcctttacgaggtgaccaggtcatgaggggtttgccctcacgaacaaatgaatggcattatctcgggagtgggttcttgataaaaggatctgttcagccactttctcgtgcatgcacacactttcttgccttccaactctgccatgggacgacgcagtgagaaggccctcgccgcaggacgacatggtgagaaggcgctcgccgcgggacgacgcagtgagaaagccctcgccgtgggaagatgcggtaagaagcccttgcctgatgtgggccccttgaccttggacttcccagcctccagaattataagaaatctcttttctttataaatgattcagtctgtactattctgttacagtaacataaaacagactaagaaaactggtatcaagaagtgggctactgctatagtaaatacctgaaaacatggctttggagctgggtgatggacagatgtggaacagtcttgaagtgaaggctggaaaaagcctgtattgctgtgaacagagtgctaagggggattctgctaagggctcagaagaaaagcagaaatgtagagaaagtctggaacttcttagaaattacttcatggttgtgaccggagtgttggtagaaatacagacagtaagctgggcatggtggctcacgcctgtcatcccagtactttgggagcctgaggcgggcggatcgcctgaggtcaagagttcaagacagcctggccaacatggtgaaaccccgtctctactaaaaatacaaaaattagatgggcgtggtggcgggcacctgtcatcccagctactcgggaggctgaggcaggagaatcacttaaacccaggaggcggaggttgcagtgagctgagatagcaccactgcactccaacctgggtaataagagcaaaactctgtcccgaccaaaaaaaaagatagcttacttgagatcaagtagagacattaagttggacataagattctggagcttggaagagaggtgataggttgggatttaaattcagaagtcattactttagagatgatatgtaagtctgtaagattagaagtcacctaggaagacagaatacacaagagaagaaaagatggcacagggctgacccttgggcatgccaatattcagaagtctaaaataaaaaaaagcagagatgcagagaaaaaccaccagtgacatgagaaaaaatcagggacgatgggtgttacagaagccaaacagaagtgtttgaaggagaaggaaagagtgattgtgccttctgttgttaaacactcatgtaagaggctgggcgcagtggctcaggcctataatcccagcactttgggaggccagggcgggtggatgacctgaggtcaggagttcaagaccagcctgaccaatatgatgaaaccctgtctctactcaaaatacaaaaattagccgggcgtggtggcaggcgcctgtaatcccagctactcaggaggctgagacaggataatcgcgtgaacccaggaggcagaggttgcagtgagccaagatcgtgccactgcactccagcctgggcaacaagagcaaaactccatctcaaaacaacaacaacaacaaaaaactcatgtggatcatgaggtcaagagtttgtgaccagcctgaccaacatggtgaaacccctgtctctactaaaaatacaaaaattagccaggcatggtggtgtgcacctgtaatcccagctactcaggaggctgaggtaggagaattgcttgaacccaggaaacggaagctgcagtgagccaagatggtgccattgcactccagcctaggcgacagagcaagactccatctcaaaaaaaaaaatgaagacagctgctactgattttgacaacagggaagttgttggtgaccttgacaagagcagtctcaatgcagtcaagggaatggacagcgatgacatgaagtagaggctgtgatcacagagcaggccacaaatgatggcctgtgggctgaagccagtctgccacgtctgccacctgtttttgtaaacaatgtgtttttggaccgaaactcattaataatacttaaaccaaactcatttgtttaagtattgtttatggggacttttgccacacaatggcagagataaatagttacaacagagaccatatggtcagtaaaggctaaaatatttactatccagcccttaacagaaagcttgctgaccctggtatagacttttttttttcaagaagtttttgctatgagaaaggaagaaaaatagggcaaaagatggcgtaaagggagtaatttttaaagatgagaaatgcttgcatacgtctgcttgggagtgatttagcaggagagaaatttatttgggggggcaatgggttaattacagaagaggactgttttaaacataatgttctggggggggcaatgggttaattacagaagaggactgttttaaacataatgttctggggggggcaatgggttaattacagaagaggactgttttaaacataatgttctgcggagggggcaatgggttaattacagaagaggactgttttaaacataatgttctggggggggggcaatgggttaattacagaagaggacttttttaaacataatgttcttgaattgtttagtgcaggggaccccaagccctgggccgtgggccagcaccagtccgtggcctgttgggaactgggccgcacagcaggaggtgagcggtgggcaagtgagtgagcatgatcttctgagctccccctcctcagatcagcagcggtattagattctcataggagcgcgaaccctactgtgaactgcacacgcgagggatctaggttgcaagctccttaacagaatctaactaaggcctgattatctgaggtggaacagtttcatcctgaaaccatgtccccctccctggtccatggaaaaactgtcttccaaaaaactgctcgctggtgccaaaaaggttggggaccactggtttagtgtatgagtattagccctttagcagggttataagtatcctttagaatggggaccaaggatatgaacagcactcctatagagcccatagctgagccaatcatccatttggtttaccggggacacgctgcgtttatgattcagtatagttattaacagctccctctccttctcaaagtgactctggtgataaatcatatggtcacctcacctacagcacctaagcaaggctatggcacagtgggaccttgacaaatattgcccactgattaaaagtatcatggtgcacctgtaagagtgctggtgctgaggctaccgctctgaataagtgcgctcataaccattcctctaacttcaggcccaaccatgagcagtggttcaaaatcacagcttcatgctttctgtaagtattctctatttggcttaaacagagtctaatatccaagatgctacatgggatcagtaaattctaaaaaagtttcaatcgtggagtaaaaagtgcaacagaggcctctgtaggcaactgaccactagaaaggactgatctttttcgacacagctcacatggaattctgtgatactgcaggtcatgtcatgttatggtgacatgctaatgggaccatagctactgtgttctagacaaacaccctaaaacatatgacatgcagctaagaaaggcaaaaaaggggctaagttatacacttaggtctcacatatgaagaagtctgcatgatcctatctcagagaaagggtttctatccctttctctcttacattaaacctggcatcctaccagaactgtctctgctgaaggtatcgcttttttcttccagcaaacaaataagactcacacaatcttacatgtcacagtctccaagatagataaactatgtgccagacttttttcgggctggaatacttttgcttgttttaataaggtactgaagttggggaaatgtactataattcattttgcagagtttaaaaactcctctgaagcactggtgctatcaggcaagtccattctcaacacacaccctaatatttgacatctaacctctgatcatgagtcatatagaaagattgttttgcaactggaagaatcatgggtcctacaagaagttaaggtttttttaagaaacacaaaaataccttcactacctggctaatcagaaatgtgctgaaagaatcactctggcactgtccctagacactttttaaaataaaaacgtggttggccgggggggcagtagctcacacctataatcccagcacgctgcaaggctgacggtggattacttgaggccaggagttcaagaccagtctgaccaacatgacgaaactccgtctctactaaaaatactaaaaaaattagctgtgtgtgctagtacatgcctatagttccagctactccggaggctgaggcatgagaatcacttgagcccaggaggcggaggctgcagtgagccaagattgcgccactgcactccagcctgggtgacagagacatactctgtcttaaaaaaaaaaaaaaaaaaaaattaggccaggtgcgatggctcatgcctgtaatcccagcactttgggaggctgaggcaggtggatcatgaggtcaagagatcaagaccatcctgcccaacatggtgaaaccccatctctactaaaaatacaaaaattagctgggtgtggtggcgcatgcctgtaatcccagctactcgggaggctgaggcaggagaatcacttgaaccagggagtcggaggttgcagtgagctgagatggtgccatcgcactccagcctggtgacagagcgagactccatctaaaaaaaaaaaaagaagaaaaaaaagtaataataaaaaaattaaaaggtggctactttccattccaagctgtatgtggattaaaaacagaactaatcactcccaaaaatgtctgcatttaatctaccccactagagtttctgaacggagcactggagctacagcttacatctaaaggtgttataaagcagtgactgttgtggccctttttaggactcaaattctatacacacacagcctgcatcctaaagtgttataaagcggcgactgtgtttaatctgcccctactggagtttctgaactgggcactggtgaactgggcactggtgaactgggcactggagccacagcctgtatctgacggtgttataaagcggtgactgccgtgctcctcttttaagactcaaattctgtaaacaggagatgaaaagcaacccactgaattagcctagaaggctcagcaaaaccaattccagcatctttgtatttctgtgcatcctaatggtaaccactactctgaattctccttgcctcctggaggagacggtgagcaggctctcaaagccacagaaggtcacgtgtggaagataaggagtatggaacctggcacagactctcctgctttcttctttctctttttcctttttttgcagaactgttgtctgccacgttagtagacagaggggctctgattcattggcagtgccttaagaaatgagcatccctctggctctcaggtccatctaattttgcagtctgcgccatcagagaatgatgctgcctttatcctgtgagtccgcaggcagcctttcagagattttaaaccgagatcccctttgtggccactgcaggaaggaggaaaggttgttcattttccgaagagctggtatggctttagactgttctgtgaaaaaataaggtgctattattcacggttactggggagaaaattagatttttccactattttgctaccatttctgttttccaacttgacatctatctgctggttcccttttctattatatggaaaagcaacgtgctgggccaggtgcagtggctcacgcctgtaatcccagcactttcggaggccgaggcaggcaaatcacctaaggtcaggagttagagaccagcctagccaacatggtgaaaccccgtctcttctaaaaatacaaaaactagccagccatcatggtacacacctgtaatcccagctactggggaggatgaggcaggagaatcgcctgcacctaggaggtggaggttgcagtgagccaagattatgccactgcactccagcctgggcaacagagtgagacggagaaagaaaagaaaagaaaggaaagaagaaaggaaaaggaaaagggaagggaagggacaaaaagaaggaaggaagggagggaggaaggaaaaagaaaaaaagaaaagagagacaggaaagaaagaggaaagaaagaaagaaaagaaagaaaagagaaagagggagggagggagggagcaacatgctgtatgagttacaagcaagggattttcaactagcagactgggattcaaaccttggctctgccagttactgtgtgatttctgtcaagcctcttatcctctaggaagtagtttcataatttccagaatgcaaattctatcagctacctgaaaggtagtaaggaatgtgagagtagaaaatatgtttggaatcgtttacccaacactcttcccctccgcatgcgaaatcttcctttcaccgtgtttctacagagtctgctgtccaagagctgaccaggccctcgttggagcagttttcccatgactttttttttttttttttgagacagagtcacgcttcgtcgtggcatgatctcagctcactgcaacatccgcctcctgggttcaagtgattctcatgcctcagcctcctgagtagctgggattacaggcacccaccaccacacccagctaatttttgtatttttagtagagacggggtttcaccatgttggccaggacggtctccatctcctgacctcatgacccgcttacctcggcctcccaacatgctgggattacaggcgtgagccaccagaatgagaattgggaaaaagagtttgtctttcgcgggtggtaggagtcccaagaagtgaaactgagttagagagcagctaggttccccaggaagggcaggaggctggactacaggtagagatgatgagggtgacacacacacacacacacacacacacacacacacacacacacacacaatctctctctcacacaatctcaatctctctctctctctctctctctctctctctctctctctctctctgagctttactcccgtctttggcttcagctgtttgacaagcccagctgagacgctatccttctggcggtcacacttgttgaacttcttcaaacgagacacaacaggatccttccaaataatcccccttttgcctaagcccgtttgaattgggatttttgtcttctgcaaccaagagagtcttgaatgagtttataaagcactcagctcacagaaagtgctcacttaatggcaactattagtattcccacatctcctagatggagtaggatatttcagatgagactaccctctaagaatcagaggttgttactcatcttttagagctttgtaaataagatggctaagttcagtatctgcaggcagactcagaagaacggctcatggattaagaggatggaatctttgaaccatgctgaaaatgagacattctccagaaaaaaattgaagtcttttgttcattcattcaattaaaaagtgagtgcctattacatgtactgtgctagatactgagagaaaaagatcactagctagggaatgtatctttaaagggcttgtaaggaatacatgtctgaattatacacaaaatgatacaaagagcgatgaataaagaatggcagcggccgggcgcagtggctcacgcctgtaatcccagcactgtgggaggctgaggaaggtggatcacgaggtcaggagatcgagaccatcctggcgaacacggtgaaaccccgtctctactaaaaatacaaaaaattaaccgggcgtggtggcgggcgcctgtagtcccagctactcgggagacttaggcaggagaatggcgtgaacccaggaggtggagcttgcagtgagccgagattgtgccactgcactccagcctggggcacagagcaagattccgtcgcaaaaaaaaaaaaaaaacaaaaacaaaaaaaaaacaacggcagcatcatttcgaaagccaggaggtcctccagagagcagaaacatggatgagtgctaccacatctgataagccctacacggaagccctcaccacatccactgagggtggacaccaagggtcaagtcgcctctctttagagaaagtctcttcttttgttactgctgaccaccccggcatcactgagagctgttgctatggaaacgaggtatccccagctgaaacagaggtgcttcagccagcctcagcaatgctaacaatgcagcccgctctccacgacggtgctcaacagcagcagaggctgcgggactctcacacacccagcctcagcaatgccaacaacgcagcccactccccatgatggtgctcaacagcagcagaggctgtcggactctcacagccacagatggctgcacgtctacagctctttgcttccctacgtgtccgagaactcaaccaggactgccctggtcaaatgccagatggcgcccatcagatgagaatcactgatgtttacacaaattcctccacaccacttaggaacctggagtgtaagaaggc

SEQ ID NO: 1962 - protein, 220 aa, Homo sapiens
MTSMNPAGYVISVRTVPSISMNRCMQIFLSLFLRKMMRGRHSLNLWGLVDGRGANTPVNLSSIQCFGAATRFRCFLAPRAMAALGKEKRTFVFREKALAAGRHGEKALAAGRRSEKALAVGRCGDPKPWAVGQHQSVACWELGRTAGEKVSSFVTADHPGITESCCYGNEVSPAETEVLQPASAMLTMQPALHDGAQQQQRLRDSHTPSLSNANNAAHSP

SEQ ID NO: 1963 - DNA, 5730 bp, Homo sapiens
  source (1)..(5730)
  CDS (201)..(387)
  CDS (465)..(565)
  CDS (854)..(1101)
  CDS (3176)..(3548)
  CDS (4092)..(4237)
  CDS (4927)..(5530)
  modified_base (6): a, t, c, g, unknown or other
  modified_base (9): a, t, c, g, unknown or other
  modified_base (45): a, t, c, g, unknown or other
  modified_base (63): a, t, c, g, unknown or other
  modified_base (90): a, t, c, g, unknown or other
  modified_base (114): a, t, c, g, unknown or other
  modified_base (116): a, t, c, g, unknown or other
  modified_base (121): a, t, c, g, unknown or other
  modified_base (123): a, t, c, g, unknown or other
  modified_base (216): a, t, c, g, unknown or other
  modified_base (218): a, t, c, g, unknown or other
  modified_base (257): a, t, c, g, unknown or other
  modified_base (260): a, t, c, g, unknown or other
  modified_base (321): a, t, c, g, unknown or other
  modified_base (345): a, t, c, g, unknown or other
  modified_base (356): a, t, c, g, unknown or other
  modified_base (368): a, t, c, g, unknown or other
  modified_base (377): a, t, c, g, unknown or other
  modified_base (430): a, t, c, g, unknown or other
  modified_base (478): a, t, c, g, unknown or other
  modified_base (497): a, t, c, g, unknown or other
  modified_base (519): a, t, c, g, unknown or other
  modified_base (521): a, t, c, g, unknown or other
  modified_base (568): a, t, c, g, unknown or other
  modified_base (602): a, t, c, g, unknown or other
  modified_base (631): a, t, c, g, unknown or other
  modified_base (657): a, t, c, g, unknown or other
  modified_base (662): a, t, c, g, unknown or other
  modified_base (665)..(666): a, t, c, g, unknown or other
  modified_base (671): a, t, c, g, unknown or other
  modified_base (677): a, t, c, g, unknown or other
  modified_base (712): a, t, c, g, unknown or other
  modified_base (717): a, t, c, g, unknown or other
  modified_base (727): a, t, c, g, unknown or other
  modified_base (736): a, t, c, g, unknown or other
  modified_base (743): a, t, c, g, unknown or other
  modified_base (748): a, t, c, g, unknown or other
  modified_base (774): a, t, c, g, unknown or other
  modified_base (793): a, t, c, g, unknown or other
  modified_base (809): a, t, c, g, unknown or other
  modified_base (827): a, t, c, g, unknown or other
  modified_base (832): a, t, c, g, unknown or other
  modified_base (3144): a, t, c, g, unknown or other
  modified_base (3451): a, t, c, g, unknown or other
  modified_base (3470): a, t, c, g, unknown or other
  modified_base (3530): a, t, c, g, unknown or other
  modified_base (3796): a, t, c, g, unknown or other
  modified_base (3806): a, t, c, g, unknown or other
  modified_base (3835): a, t, c, g, unknown or other
  modified_base (4889): a, t, c, g, unknown or other
  modified_base (4891): a, t, c, g, unknown or other
  modified_base (5230): a, t, c, g, unknown or other
  modified_base (5490): a, t, c, g, unknown or other
  modified_base (5522): a, t, c, g, unknown or other
  modified_base (5573)..(5730): a, t, c, g, unknown or other
attgantcnacacacgacgtcatcgtctacagtcggtacaatcantcacgtgactcatcgtcncgtccgtacgtactaatacagtcattncgtatacgtgtatcatactagtcngntatcntngtctctacgtacgtcgtctgagagtcatactatcgtatgctcgctcgtccgtgcgacatctcctctgacatatcgatatgcccatcatcagtngnctgattgagctcgactctcagtacgtcctgtgctctgantgntcgatatacatcgctgatctcatcacatggtatctcgacacttctcaccgagcactgtcantcgctcgtgactatcagttgatcnatatgcgtgcntgtcgtagctantgtactgcntcatctatctgtacgtagcgctacgtcagtgatagttagcactactacgtcgngatactctgtcagtagtatcgtctgtacacacagctactcgactcacnagctacgctgatatactcntgctgcgagtctatcagacgancntcatccgtcactcacctcttacactgacacgcactaggtacgtagtnagtcgtacagatcatcttgatgcatcagtcagcntgacactacgtacttcagtacgacacctngtcatcatctctgctatcacgtcacntcgcntcnngtcantcatantatctactcgtacactgctctagtaccggatcaanctggntagtcaccgnatgcgtgcngtcacgntgacntagtagtgtagcattagagagtcgcngcattcgtcaatgtactangacattactagtccgntactattactactcagcntgatnctccgtccggcgcgtcgctagctagtcgttctgaagcggcggccagagaagagtcaagggcacgagctacggccatgcctttcttggacatccagaaaaggtttcggccttaacatagatcgatggttgacaatccagagtggtgaacagccctacaagatggctggtcgatgccatgcttttgaaaaagaatggatagaatgtgcacatggaatcggttatactcgggcagagaaagagtgcaagatagaatatgatgatttcgtagagtgccggttttttttttttttttttttttttttttttttagaacaaataggatggagcaatcctttatttttacacactttgacaaggaggtttgtcgtaaacaacctttccagtggagaacagagaacaggaaaatcagcctccagacatcagcagctgctctgttcagggccgaggactcccctggtgctctcctttgaccccatgaagactcaattggactcacctttggactgatcgtgtacacttacctggtaccccacccgggtggaaaatcgatgggcccgcggccgctctagaagtactctcgagaagctttgttgaattccggttttttttttttttttctttttttttttttttagaacaaataggatggagcaatcctttatttttacacactttgacaaggaggtttgtctgaaacaacctttccagtggagaacagaaaacaggaaaatcagcctccagacattattagctgctctgttcacggccgaggcttccccttgccaatgcggtgaggtggaagggtgtactttcccttcttttatcaccttatcccgctgcttactgatggccctggacgtttaatcgttttctgccgaccaaacccttttcgaaaatattataatctaatcctgaattttttttcggcctatgtttaccggtttccttggcacattctattcatccttttttcaaagctatgcattcaccagtcctcttggtcggcttgttaacactctggatcggcaaccttttatctttgttaaggccgaactttttctggatgttccaacaatggtttggccccagcttcgtgcccttggatctttccttggcccgtgttttagtaacgatttatttattaaaccccccccggaacacaggtgtcgtgaaaactacccctaaaagccaaaatgggaaaggaaaagactcatatcaacattgtcgtcattggcacgtagattcgggcagtccaccactactggccatctgatctataaatgacggtggcatcgacaaaagaaccattgaaaatttgagaaggaaggctgctgagatgggcgggggtcatttttgctgtcaccagcaacgttgccacgaacgaacatccttgacagacacattcttgacattgaagcccacattgtccccaggaagagcttcactcaaagcttcatggtgcatttcgacagattttacttccgttgtaacgttgactggagcaaaggtgaccaccataccgggtttgagacaccagtctcactcggccacaggaacagtaccatttatgcagactcgaaattaacctcactaaagggaacaaaagctggagctcgcgcgcctgcaggtcgacactagtggatccaaagaattccggaacacaagtgtcgtgaaaactaaccccaaaagccaaaattgggaagggaaagaatcctatccacaatgtcctcaattgacacataaatttcgggcaggtcaccaataatgggcatccgatctattaaatcggggggattcgccaaaaaaaccattgaaaaatttttgaagaaggtccctcacttgggaaagggtccctctcaaaagacctgggccttggttaacataaaaattaaccgtaaactagggttgaccattaaaatttccttctgggatttttagtaccgaccaagacctatttggactaacagtgaaatgccccaggaccacaggagaactttttccaaaaaccaaaatttttcaggggaccatctccaggcctgactggttgctgggacccggaatatgttggcttgcctgggtgagttggggggaaattttgtaaaacctggggggaatcctccccaaagggaaatctggggacagaaacgccccgagagaaagcccatatggcgccctttccttggggcgttttagagaacaacctcgcgggataggttggaggaaccaaagactataagaatgatgtccaggggagttttgaacccacaaaatatagggaatttcgcaacactgatagacccccccgcggctancccccttcgaaccgtgtacgactcactatagggcgaattgggtacacttacctggtaccccacccgggtggaaaatcgatgggcccgcggccgctctagaagtactctcgagaagctttttgaattcgggggtcatttttgctgtcaccagcaacgttgccacgacgaacatccttgacagacacattcttgacattgaagcccacattgtccccaggaagagcttcactcaaagcttcatggtgcatttcgacagattttacttccgttgtaacgttgactggagcaaaggtgaccaccataccgngtttgagaacaccagtctncactcggccaacaggaacagtaccaataccaccaattttgtagacatcctggagaggcanggcgcaggggtttgtcaggtggaacgaggtggtggtagggatgcagtcccagagcctcaagcagcgtgggttccacttgcatttgcattcctaaccggtgacttttccatcctttgacccaaggcatggtaacactttgcttccgcatgttgtcaccatttcaacccggaaatggcacaaatgctactgtggtcggggttgtagccaattttcttatgtaagtgctgactttcttaaacaattcctcatatctcttctggctgtanggtggctcantggaatccatttttgtaacaccgacaatnccgggtcctatttggctggcactgcctaggcactttcacaggtatttcatcctaatcctcacaacagccctatagaggtaatcattggtcccagtttacagaagccttgggtgggagattattgcttgatatacttctatttgccacacattttgttggcaagacgttcgtatcggctggtgattcactggtcaagaagctctcattggccaggagttcctatttgttggctgtaagattcaataatcaaatctagatttttccccccggggtgtcgctggagaagtaccgcggatcggtgtccctggtggtgaatgtggccagcagagtgcgcttcacagaccagcactaccgaagccctgcagcagctgcaggcgagacctgggcccccaccactttaacgtgctcgcttcccctgcatccagtttggccaacaggagcctgcagcacaggaagatttatccaagcgctgaagtaaccgcacgaaagggaacaaaagcctggagccgcgcgcctcaggtcgacactagtggatccaaagaattccgggtcctaatttggctggcacctgctaggcactttcacaggtaattcatcctaatcctcacaacagccctatgaggtaatcattggtccatttacaaaccttggggtgggatatcttgtatactctatttgccaccatttgtgcaaagttgttcgtggtgatcctggtcaactccattgcagagtctattttgcgtaaatcaataacaaatcagaattttcccccaggatgtgggccatgggtgagagtaagggcggagagtcaaggggctctcccctgtgaggcacccaattgagtttgcattggtcaagccccacacgagatgggcggggaaaaaggaggataggaaggaggagacagccgtggggtaataaggcctgcccgcctgcagttgggattgagcgtcccgcacgaagggcggtgggaacaagggggcggaagctacctccgagctggcacagattagggccccaaaggcccgaaagaaccttttccaatgtggcttcncncatagacccttggaatcgaatacgactcactatagggcgaattgggtacacttacctggtaccccacccgggtggaaaatcgatgggcccgcggccgctctagaagtactctcgagaagctttttgaattccggggtgtcgctggagaagtaccgcggatcggtgtccctggtggtgaatgtggccagcgagtgcggcttcacagaccagcactaccgagccctgcagcagctgcagcgagacctgggcccccaccactttaacgtgctcgccttcccctgcaaccagtttggccaacaggagcctgacagcaacaaggagattgagagctttgcccgncgcacctacagtgtctcattccccatgtttaacaagattgcaggtccccgtacttggtgccaatcttgccttcaggtcctggcccaaacttttgggaaaggacccaactggaacttttgggaggtcctaataaccccaaaatggaagggtgtaagggcttgggaaccaacctgggtaatggaagaggtcagaacccagatcacagcgctcgtgaagaagctcaatctactgaaacgagaggactataaccaccgcgtctncttcttcaccaccttatcccgcccacctgtgntgggctgaccaatgcaaacttcaatggtgcttcaaaaggagagacccactnnnnnnnnnnnnnnnnnnnnnnnnnnnnnnnnnnnnnnnnnnnnnnnnnnnnnnnnnnnnnnnnnnnnnnnnnnnnnnnnnnnnnnnnnnnnnnnnnnnnnnnnnnnnnnnnnnnnnnnnnnnnnnnnnnnnnnnnnnnnnnnnnnnnnnnnnnnnnn

SEQ ID NO: 1964 - protein, 552 aa, Homo sapiens
  MOD_RES (6): Variable amino acid
  MOD_RES (19)..(20): Variable amino acid
  MOD_RES (41): Variable amino acid
  MOD_RES (49): Variable amino acid
  MOD_RES (52): Variable amino acid
  MOD_RES (56): Variable amino acid
  MOD_RES (59): Variable amino acid
  MOD_RES (67): Variable amino acid
  MOD_RES (74): Variable amino acid
  MOD_RES (81)..(82): Variable amino acid
  MOD_RES (271): Variable amino acid
  MOD_RES (277): Variable amino acid
  MOD_RES (297): Variable amino acid
  MOD_RES (453): Variable amino acid
  MOD_RES (540): Variable amino acid
  MOD_RES (551): Variable amino acid
MPIISXLIELDSQYVLCSXXSIYIADLITWYLDTSHRALSXARDYQLIXMRXCRSXCTXSSISTRLXSYADILXLRVYQTXXIRHSPLTLTRTRYVLVVLKRRPEKSQGHELRPCLSWTSRKGFGLNIDRWLTIQSGEQPYKMAGRCHAFEKEWIECAHGIGYTRAEKECKIEYDDFVEANWVHLPGTPPGWKIDGPAAALEVLSRSFLNSGVIFAVTSNVATTNILDRHILDIEAHIVPRKSFTQSFMVHFDRFYFRCNVDWSKGDHHTXFENTSXHSANRNSTNTTNFVDILERXGAGVCQIFPPGVSLEKYRGSVSLVVNVASRVRFTDQHYRSPAAAAGETWAPTTLTANWVHLPGTPPGWKIDGPAAALEVLSRSFLNSGVSLEKYRGSVSLVVNVASECGFTDQHYRALQQLQRDLGPHHFNVLAFPCNQFGQQEPDSNKEIESFAXRTYSVSFPMFNKIAGPRTWCQSCLQVLAQTFGKGPNWNFWEVLITPKWKGVRAWEPTWVMEEVRTQITALVKKLNLLKREDYNHRVXFFTTLSRPPVXG

SEQ ID NO: 1965 - DNA, 2332 bp, Homo sapiens
  source (1)..(2332)
  CDS (201)..(238)
  CDS (803)..(1746)
  CDS (1870)..(2132)
  modified_base (1341)..(1343): a, t, c, g, unknown or other
  modified_base (1392)..(1491): a, t, c, g, unknown or other
cagctgatttatctaataatagcagtagcaatgaggtatcatcctgtcactgtactccagcctggatgacagagtgagaccccacctcctaaataaagtagtaggtgcagcagctaatccttatataacaccagacattattctaaacttcatttactatacaactttatgagttaggcactactatcgctgttttactgatgaagagagtctcagagaggataagtaacttgcccatgtgacacagtaaggagtgaagattctatgtacagcagcctgacttcactgttttttttttttttgagacggagtcttgctctgtcgcccaggctggaatacggtggcgtgatctcggctcactgcaacctccacctcccgggttcaagcagttctctgcctcaacctcccgagtagctgggattataggtacccgccaccacgcccggctaaattttgtatttttagtagagacgggatttcaccattttggccaggctggtcttgaactcctgacctcgtgatccacccgcctcggcctcccaaagtgctgggattacaggcgtgagacaccgcgcccggccagtcattactcttaaacacatccatttacatgcctgggtatcagttggttcctccaatggacgcttaaactcacccactttagtatatgatacacatatatctaatttaagggaactgtatccattttactcagtttaatggatactagtactatgtagaatgaataataaggagagagcaggagggaggtgataaatatggggcagttgtgaacctataggcccgccgcggagcccagcagcagatgcgcctgtgggctctggggggcagaagggagggaccgcaggctggtactcggcagcctcgcggcggccgggagctcaggcgcaggcgcggcccggctgtcaggcgctgatgcgcggggccacctgcagaggcctcctcaccctgtccccgggatgtcccctagacgcggacccccgtgccctccttgccctgtgctgtcacagagtgacctgaatcctcccacgccaaaaagatgggtggaagaaagtatttccaaccctccccccgatcatcccttacccagggagagccgctggcccctcagcagggggctgcgcacagcggtggagcgatctgcggctttgtttctcaggcacctgttgtggatcccaaatagaaacgtcgcccttggggatccgggaccgggcagccagtgtccgggggtgggcgtgcttggccgcacggtccaccagggtgggcgggcctggggagggggcctggggcgcgtggctctgcctgggaagggaggggccnnnaggcgccggggccggggcttggccggccggggcgctggccggcgggctnnnnnnnnnnnnnnnnnnnnnnnnnnnnnnnnnnnnnnnnnnnnnnnnnnnnnnnnnnnnnnnnnnnnnnnnnnnnnnnnnnnnnnnnnnnnnnnnnnnngggatgctgaggtcggcggcggccgcaggacgatgcgcggggcccgggcggccgcggcggcggcgttgctcctccccactcgccgcgtccccggcggggctgcgcccgggggctgcgcacggacgggggcgggggcgcctggggagggaggggagaggatcccagccgccgagtcgcagcctcgtcgctgtctgctgagtcatggcaagcgctccccgcagccctggatcactcgcgtagcgcggctggcgcggggtgcgcagccattgggctgggcgcggggccgcgagcgccaggcatgacgcgctgagccgcgctcacccgtgcccgccgtcccggcgtgcgcccagcgcgggtgcctgtgccgccgccctccagccccgccgtcgagtcgccctcgcctcgcccgcaccatgatcgccgcggctttcctcgtcttgctgagaccctacagcatccaatgtgccctcttcctcttgttgcttctgctgggcaccatcgccaccatcgtcttcttctgctgctggcaccgcaagctccagaaagggaggcatccgatgaaatcggtcttctcgggtcgttcaagaagccgaggtaagacacgccgcgacgggtttctgcgggctaccaggaacaattaagccgatttggagagtgaagcgcggctcgctcccttctcctcggctgcccctagccccatcattgcccactccccaggctgagtgcgtttctttaacgccccttgccctttttgccgtcacctccgccctccagtctcccaggtttgaataaccacggcgatgccgagggcagggaggggaggaaagaactcaaattttta

SEQ ID NO: 1966 - protein, 414 aa, Homo sapiens
  MOD_RES (193): Variable amino acid
  MOD_RES (210)..(243): Variable amino acid
MKRVSERISNLPMPAAEPSSRCACGLWGAEGRDRRLVLGSLAAAGSSGAGAARLSGADARGHLQRPPHPVPGMSPRRGPPCPPCPVLSQSDLNPPTPKRWVEESISNPPPDHPLPRESRWPLSRGLRTAVERSAALFLRHLLWIPNRNVALGDPGPGSQCPGVGVLGRTVHQGGRAWGGGLGRVALPGKGGAXRRRGRGLAGRGAGRRAXXXXXXXXXXXXXXXXXXXXXXXXXXXXXXXXXXDAEVGGGRRTMRGARAAAAAALLLPTRRVPGGAAPGGCARTGAGAPGEGGERIPAAESQPRRCLLSHGKRSPQPWITRVARLARAPPSSRPRLARTMIAAAFLVLLRPYSIQCALFLLLLLLGTIATIVFFCCWHRKLQKGRHPMKSVFSGRSRSRGKTRRDGFLRATRNN

SEQ ID NO: 1967 - DNA, 2483 bp, Homo sapiens
  source (1)..(2483)
  CDS (201)..(311)
  CDS (480)..(1253)
  CDS (1300)..(1421)
  CDS (2016)..(2283)
  modified_base (890)..(989): a, t, c, g, unknown or other
  modified_base (2334)..(2433): a, t, c, g, unknown or other
ccctgatgtgcgcccccattgtagaggaagtgcttatcgggtcacctgttttcagtaaataaagcgcgtttctttgacgctgtaacggtaacacagcggctcacgaatgtgatcacgcctgcattctccatttttagcctacaggattgagaaaaacttttgctatagtttagtaaaattttaccctaagggaggaagcaatggaaaccgtggcttacgctgattttgcacgtctggaaatgcgcgtcggaaagattgtggaagtgaaacgccatgaaaacgccgacaagctgtacatcgtacaggttgatgtggggcaaaaacgctgcaaaccgtgaccagcctggtgccgtactacagcgaagaagagctgatggggaaaacggtggtggtcttatgcaatctgcaaaaagcgaaaatgcgtggtgaaacgtcggaatgcatgctgttgtgtgcggaaaccgatacggcagtgaaagcgtgctgttaacgccggagcggatgatgcctgcgggcgtacgcgtcgtataaaaagatcggatggcgacgtcgtatcgccatccgatttgatattacgcttcttcgacacttactcgcatggccgccagcgccttacgcgccgctttgatcaccagttcacactgttcaatggtcagtgtcagtggcggttcaatgcggatcgttttggcgttattgagcgttccggccaccagtacgcgctggcggaacatctcgctggcaaagttatagccgatttcgttatcaacaaactcaatcgccatcaacatccctttaccacgcgcttcctgtaccagatcgggatattcccgcgccagttgacggaaaccgtccagcaacatatctgctttttgctcaacctgagccggtannnnnnnnnnnnnnnnnnnnnnnnnnnnnnnnnnnnnnnnnnnnnnnnnnnnnnnnnnnnnnnnnnnnnnnnnnnnnnnnnnnnnnnnnnnnnnnnnnnncggttttctctcttccccctttggtgcccccccatttgttggggcattttccgcggacccttcgccctccatcccttttttccccggccccttctcaccgcggggggaattccgggcccctcccggcctgtaccgtggttatccccatatgcactgcccgaccagttccggtttcatccagccctgcgccaggttatcttcttcgatattcatgtgatagaaatcgccgataatctgtacatgtttaagatcgttttcgacgatgtaacggcgggcatcggcgagggtgttgatcatatgatcctgatagcggtttaaacggttcgagatacaccacggttccggtacgcgcggcgacctgttccagtacgcgcagggaatcactcaccattttgcggtcgccgtccaggctacgcggcgaggtcatcggcggtaagcggaaggtaaacatgccccacgcagccggaacgacgatgcctttaccgcccacttctgccagcgcttcgagaatgcgctcgatctgctttaagccattaagacgacgctcttcgataaagtcgccatccatccgtcatagccaccgcaggcggtggtcaccggtaaaccggtttctttgatcgccgctttgacttcttcgatgttgttaaccagcagtttgccgtcaatctcaaaccatcgaagcccatctctttgatataacgaaatttctccagaatgttttccggaaagaacgcctgattctgtgtgccgattttcatttttttcattcctttgaattaaaacgtaacgcccattttgatgctctgttccggatgctggtcgacatactgcatatagctttccgggctattggcaaaggtcaccaccgggtcgattaaatcttcgcaattgagataaccgttcatcagcagttcccacaggtttcttcaatacgcttgcggctccagcgcggataatccgggttcggttcgctgcacgcgcgagagaagacattttggcgttattgaaatgcgcttcgcgtccgaggttaaaaccttcggcaacggcttggcaacgcgacataggagatggtgccgccataagccagaccgcggagcgccgattgcagcgcgtcggcgtagccgctggtttcgataatcacatcggcaccctgcttgccggtcagcgttttgatctctttacctacatcagtgccgatggggttaaggcagaaatccgcgccgtggcgacgggcgatatcacagcgatgggcgataggatcgacgccaatcaccacgaagcgccgcgcgtttagccagttggatggcaatttgaccgattgcgccagccctaccccaccacaaannnnnnnnnnnnnnnnnnnnnnnnnnnnnnnnnnnnnnnnnnnnnnnnnnnnnnnnnnnnnnnnnnnnnnnnnnnnnnnnnnnnnnnnnnnnnnnnnnnntctgttgtactgttttccgttttgttcgttcgtctctctctctcctttgg

SEQ ID NO: 1968 - protein, 424 aa, Homo sapiens
  MOD_RES (174)..(207): Variable amino acid
METVAYADFARLEMRVGKIVEVKRHENADKLYIVQVDRAVNAGADDACGRTRRIKRSDGDVVSPSDLILRFFDTYSHGRQRLTRRFDHQFTLFNGQCQWRFNADRFGVIERSGHQYALAEHLAGKVIADFVINKLNRHQHPFTTRFLYQIGIFPRQLTETVQQHICFLLNLSRXXXXXXXXXXXXXXXXXXXXXXXXXXXXXXXXXXRFSLFPLWCPPICWGIFRGPFALHPFFPRPLLTAGGIPGPSRPVPWLSPYALPDQFRFHPALRQVIFFDIHVIEIADNLYMFKIVFDDRFKRFEIHHGSGTRGDLFQYAQGITHHFAVAVQATRRGHRRLKPSATAWQRDIGDGAAISQTAERRLQRVGVAAGFDNHIGTLLAGQRFDLFTYISADGVKAEIRAVATGDITAMGDRIDANHHEAPRV

SEQ ID NO: 1969 - DNA, 4218 bp, Homo sapiens
  source (1)..(4218)
  CDS (201)..(588)
  CDS (721)..(1177)
  CDS (1215)..(1559)
  CDS (2695)..(2955)
  CDS (3373)..(4018)
taacgacgccctcgagttcagagctgaagtcacagccttccctggaacaccccccaacaggcctcatggacaggctcctgccacccaccactcagtcagaaaccagcctcccagctacccgctaaccccgctctcagccctctctccctgcaccacggccaagatggcttcagtccaagccccgctccagccagtccctcatgcctgccctccgtgcagctgatgtcgccagcctctggaggaaacccaagcctgctctgaagggtttcaggaaggtgctcagctcttgcagaggcagccggggctcttcaaagtgcaccgtctcacccctggccccagatggcacgtgcctctctaacgggaccatgccccagctgacactcactcgactcccaaccactgtctcctccaggaggccaaggccgccccaggctccctgcgggtcaccaccttctctgtccagttccgggaaagcactggccgtcctgcctgcctgtggctgttcctgctacagccctaagcaggctccacagcagcacagcacacccctctccagcccggcccagagcaggcccagggaaatgcaaggtgccgctggccctcaccgccctctgagagctccatctcgccggcctccagggcttcgctctccgctgtggctgccgcctcctccgcctcctcctcctcatcttcatcttcagctacactgagctcccgcagtctggtttcggtctcaggggcctcctggggctgcagcctcagctgcacggtatggagatgctgcaagacctgcctctgaggagcagagggatgctcagctcaggactgggggctgtgggcgcagagaaagatggggatggggcacaaggggcaggcaggctgcaacgaagctgggctcactggggagccagtatgggtgggatgggctctcgcacctgcagctggggacgctgggcctgctgggcacagctgagcgctttctggaagcacggggccagcagctcgtaggcatcgccggcctcctcgcgggacagtgcaatgttcagccaggtcttggcctcctggagcaggaggaaggacagggtcgggggctgccgctgtctgcgtccaacgggccccagtcaagcttccccggctgcccagacgaaatgggagcccggcctcccagctgccgagggtggatggtcctaggaaggagctgcccgtccagtaaggacacctgtccatggccaccctgagaacggcagtcctgaggcagagacatgggtgaacctgcattcgggcggggagcaagggtttcacctccagcacgttgccgctgcgcagcctcagttcctcctcatagtggcgcacggccccatggtggtccttcatgtctcccagtgtggtggccagggacacgtggatgatggcccgctcagcacccggtctgtccagcagctcagcaaaacgcagctgggggcagtgccagtgaggccaggggctgccaccctggccaggcctcgtcaacctcactggcccttccctcccacccagccggggccacacacctgcttctggtaagcctcagctgccctgggaaagtctcctgccttggagaagaggtcccctagctgctcacagatgaccatggcaccctgagggtctctgccctcagcctcttccagctgttgctgcagccggaccactgccagcactgccgggaagaggttcatgcaggggggcagcacagggggccctgaccccagctctaccacctgcaagctgtgagccctgtggtggcccccccactctctccacacctctgcctgcctgttggtgtgggggttaatagcagggtctatcttggggactggtctcaagggtcacaagaactaacacacttaaaaactcggggccaggtacagtggctcacgcctgtaatcctaggactttgggaggccgaggcgggcagatcatgaggtcaggagatcgagaccatcctggctaacatggtgaaacctcgtctctactaaaaatacaaaaaatcagccgggtgtggtggcgggcacctgtagtcccagctactcgggaggctgaggcaggagaatggcatgaacccgggaagcgaagcttgcagtgagccgagatcatgccactgcactccagcctgggtgacagagcgagactccgtctcaagaaaaaaaaacaacacaacatggatggtgcctggctcaaagtaagggctgacggctgccaacctccaatggtggtctctgccatcagcactcctggaccacgcgtgccatctcctctcccaccctgggaggctaggggtacaactactgtctccagtttgccaatgaagatggtggctgcgaaataaaagcccagctggtctcctggccgccctttcattgcccctgacacactgtgttgagctcagagaaaaaagggggtcttctcctgtcaggaagtaggggtacctgcccctcttgctgaagctgctgcctccaaggacaggtgctcaggcctcctctgtgagggagagagccctgtacacacctggcgggactccaccccgcccccaggctcacccctgcacacacctcccagggccccattcggacccccaggctcaccatgctggaggttctgacagatggctgccctctgcacaggcttctgggagcccagcctgtaggccttcttcagggctcgcttggcagccaaaaaagtctcccaggtcttggaggacctggagagcaaaggacagcaaaggttttgcagaatccccaaggcccgaatctacgagagcctgagctcggagccacgcacagcgggtacctgtgcaataaccacgcagcactcgctctccatgaaccgcttcctcatggtgtgcgcacactcccgggcaccctccaagcagcgcatagcctgggagtgctggcccgcgcgccagtggatggtgcccaggttgtagcgggcgcggaataggtcctcgtaaaggtggttctgcctgcagaggggtgacgaccactgagcacccaggagtgtccatgacagctgctgatgccacacgggccccagccctgccatgctgtggtctcagggccctaaccatgcctggccttctcccagtgtgtggcacaggtgtgagaggtggggggatgaggcccagccagactgctctctcaggaggactctgggaaaaatactcccctaactacttcctccaggaacaagggactccactccctcctggggcggggcagggccttactccgcaaggaagatgctcttcctgaagtaatcgttgcacagggctgtctgctgcaggctctcaaaggtgaggcccaggttgagatagaggcgggtcctcatctcattcagctctccctgggccagtgtccctggaagatacccccccaaacactcagccacttcctccccacatggggtttccagctttgggccccatttggggcctgtgcagcgcctctcctaccccctccctcctcccgaggtgggtgcaagtgtcctgcggcagatggagcacagagtggataaagagctgacgatctccaggggaaaggttgagcggggcatgcacccctcacacaagagccttgcaaagggagggctccagaagacgggattgcccaaggaggctgcgggggtgctgggctgcagcctcttcggcccgaagttcaggaggcagaaaacgcggaggggtctgcccaccctccagctcctcatccacaatagccaagctcttctcaaaggcagcctgtgcctgcagcaaagcatccctcgactggcagtggtcatagatgtccaggtgggtgcggccgatggtggcccaggccctctgcagctccgtgtggttgcgcagggaatgtgccagctccaggtactggtgctggtgctgagtgtggaaggaagtcactgctgtgagccgactccgcctcaagcaaaccggcaccgccagattcccagagaccctgttcttgctaaggaaagagcctgctccccctaacccccacagagcaggccaaggccagacacgtgcccctcctctgcatgccaagggctctctgtggtgacagtggcttcacgctgtatgcagccaacgctgtcacgtggggaggggcagctgggagttggcggggggttgcagtcctgcctccagcagccagggtcagggagagcttttgggatggggcctgacctccccca

SEQ ID NO: 1970 - protein, 698 aa, Homo sapiens [sequence omitted]

SEQ ID NO: 1971 - DNA, 15203 bp, Homo sapiens
  source (1)..(15203)
  CDS (201)..(377)
  CDS (872)..(1717)
  CDS (1918)..(2709)
  CDS (2795)..(3118)
  CDS (14905)..(15003)
  modified_base (14274)..(14373): a, t, c, g, unknown or other
  modified_base (14466): a, t, c, g, unknown or other
  modified_base (14518): a, t, c, g, unknown or other
  modified_base (14529): a, t, c, g, unknown or other
  modified_base (14616): a, t, c, g, unknown or other
ggacaaaaaggaaacagaatggggggctggggtcaaaatgtgccaaaatcaaatcaggcacagaagcacagtgctggctgagcccttggccagctctctgggaggggacactcctggcactataagggatccacaagtgccctttaaagctgggtcctaaaagggccctggaagggccaggccttgtaagtcctcccaacatgctggtggcccggagacagcaaagagtggagaagggagaaagcggggatggctccgaactgcctcttctcccccccagactccagcacttgcacaaccaactaaacacacccagacacatggcctcattgtctgatacacaggaaggcacacacatctgtacacacaggttcgtggttaggtgcactgatgcacacagcctcattgtatacaatttacacacacacacgccctcccagtagatgtatacaacacattcaatccgccagttgggtggtgtagtcacacaatcatacacactcacaaactctgtcaggagtgaacaggcatagaacctctccaggctcatgctcacgcacacacattccacaacccctcagtcaggcccatacaaacctctaatacacacaacacaaactcacagcctgtcaggaaaaaaagcactcacaacatctccgttaggtgcgcaaacccttacaatctcacaacctctctgtgaggtgcacacatatccttacaatcactctgtccgcgtgtgcacacacacatacaagtgcacacacttagaacctctgtgttaggtgcacacacaggctcacaacttctctgcgggcgtgcgcgcacacaaactcacaacctcccggttagatgcacacacactcgctcccagtctctccgccagcccctgcacactcacactggctcagtcggcacacgcactctggcagcctcgctctcctccgggcgcaccccacacccacgcaccctccgggccctgtgcacccctcccccaggcccatgccggcgcccggcagtgaactccagcggcgcggggtgtgcgctcgcccccagcccgcggccgcctgcgcccctcctcacctttctcgcccgcgcccggcaaccggccctcgtcctccttggggttggtcacctgggtgatgatggccgggccgtccatgggtgcgcggcgcggcggccgcccgcaggcccggccccccgcaagccaagcgcgcgggggcgcggcgcggggggcgcgggggcgcggcgcgggggggcgctcgcagccgctgcctgggcgcgcccgccgcccggccccgcgctctgggagaggcggcccgggcccgcgccccagctcccgccgccgccgccgctgggctcgagcggccgccgcctcgtcaccatgaaccccggagccgcgcccgggagagccgcgcacggggaggcggagcgggaggcccggcgccgctggaagcgggagcgggcgggcgagggggaaggagcgagcgagggcgggagggcgggagggcgggagagagggagggaaggagaaaggaagggagggaaagaagaagggcgggcgggtgggtgtgtcccggcccggggaccggcctccgccgcgggctctgcccgctcgcctgctcgcctggtgggggagaggggagcggggccgacacagggtgagtggagggcgggagggggcggccgcgcgcgcgggggcccggggcagttgagtggggtgaggggctcggggtgtagcggacggcagaggggctcggggggttagaagtgaggggtgtcaggggggcctggcagaatgagtgaggtgagaggcctggggtgtgagagatgtggggaggagtctgaggcagatgggtggggtgaggggagcggggggattcgcgggggcccgtggggggcactggaaggattcggaagggtgcagtgtgggagcccgggggccgagggggcatggcatggaggcaggagcgaggaagggggcccgaggagggatatttaccgcgaggaggcgcgggaagtgctggcggaggtgctgtgagggtgtctcgggaaggtgctgggcgaggggcgtccaggcgagggaaccgaggggcctgggacgtgagtgcggagggaagcggtgtgcagaagtgggggctgcccaggagcggtagtgacacccagacggcccgcagaggggcccgggcgcggcgctgctgtgatggagaccggggagcgtggggaaggttcggagaggcccagggctgcgctccccagcttgaggggtcccaggagttagcgggatcgggagtgatctgtgcagagagggagtcttcggaccgggccagaggctcaggttgttcggatgctggcgggactcgcgtcagcattcggccccagagcccgcgtgaggggcggcgggtcctgaaggaccaacctcctgcacgtgagggtgtcgtgactgagaggggcctgagcagtgggcattttcgggtgctgtgcagcaaggggaccgggggagtccgtcgagggcagaagagcggaaggcgctggtggcagaccaagtctggcagggactgtgcttgtgcaaggcagctggccactgtcgcgcctagcacgacggccagagcgtgggagagacgacaaagtgcctcctcagcctgggagcgtcggggcctttggacgcccgcgtcctgcgcttccaacttgcaggccacactctgcagccccgtaagccgggggggcggggtagtgccgcaggagggcgggctcgggggtggggccaggaggctcgcgcgcgctctccacgaatcaggagggcctgggagggcctacagggcgcgacgtcggtgggcagggttcagtgggcggcctgaggcgaagagctgcttgcctccgcctgctaggttgcgcgcgcacttcaggccttgcgggcatgtccagctcttctgtggcttccagcaggcgaggccaaacaggatctttctcacttccccacatctcctggatcctggagctgatgcagtcaggtcccgtgctcaccgggggaaccggcgagcctctccaaagtattaaaggacacttccggaagagcctttggcctgtggtcagcccgcagacatcggtggtctctgtacctgtaggagccccatgagggtccaggtgtgggagacagtcctgggacagggcttctgcggccgaggcaggtggaaaggcactccaggggagctgctgtaaaaggtagttggtaggcaagaggtgggcgttctgctccaaatccaggacctccactggcattctggctctgtgtgtgtgggcgggaccaggtgccagttgcccttggggcgtgctcacgtgtgagtagctgcttttccaagggcacctttgggaccccagtgaatcacctcatggggtagatccatgatagttgaagaagtgcccttttagtcaggaaggcaagccctagtgtaatagcccaggctccagggcatgcccttcttaatcctcccaatacagaccacaatactgggacggactcccaatactccctaatacagaccacattagggccccatggcagctagcatttcccttgttctaacttctaatgctcttcacatttgttatgagggtgtggctgacctgggacctggtgaaatcaattttctaaaataagaaaaataaaaaagaaaaagacttctgaattctaaggggtcagagaaggatcttccagagattgctgagtggggagggcctggggatatggttctacagtttttggtcataaccacaaagattagcatctctgctgcctggtcgatgaagcatcccaaatagtccatcagcgagggcaaagtgatggaaacatttggagtcactgattaacatgcttgagggctggatcccttatttgggaggtgggagtacttccagagcttcttttcacttaatgaaggctgggaagctcagagctcagtggtacagggctggaggaagtcattttcatatatagagtctttcttgtttggcctcttttgtagcaatgactccccaggaccctccagtaacaattttcctttacctgcatcccccaccatcctcaggttcctgagatcaccttgaaaaaaaaaaaacccttaccttcgcccaagtctttcaggctcaagcaagaaaaacaacttgctatcttttaagtccttgttcccctcagttatgctctttgatttattattttatcaatattaatagaatcaaagaaaagtatcacctatagccctatcaccatcccttagtccatctctaatttcctccatttctccctgtccttgcctatatgctgacataattttatgtagctataaaaaagccatgtttaaaattataaggttagcattttcttatgtggtgacataattgctgttactactattataagtgattgcataataccttactgaaacagtcttagataacacagtattttggttttacacatgaaagaaagattcaaaaattgttgggacaagtacctatccatgaggaaaaaatatatctttatcccagtccttacagcacattcaagatagactgaataattaaatataaaaaattaacataaaccagaacaaatgggtaagtgctttttgatcttggatgggaaaggcctgagagtgacaaaaacttaagaaattgccaggataagactgataaatttggctatattcattcaacaaacatttattgagtgcatattctatatgcaaggttctgctctagacactggggatctcagagttatctaaaatgacaagtagggagttgagctatcatactctcacacaagtcagtcagtcatagccaaaggctgtccctgggggccttaagcccctgggcactctggggctctctgggaataggagcaaagcagccccactgacctgaggacaggtgccagccatgggaagccagagcacatcaagccccagtgggggatgtccagaaacagtgaaaggggcccaaggggacctagacagagcaccaaagtgttggttgaagttacgtttcccaaattcccatcatacagtgtccttgtaccacctgtacaagaacaggtttaatatttttctttaatttttatttacatataattcttttaataggaaactaatagattaggttttgagttttttgtttgtttgtttgttcgtttgttttttgagatggaatcttcccctgttgcccaggctggagtgcagtggcgcaatctcggctcactgcaatccccacctcctgggttcaagggattctcctgcctcagcctcctgagtagctgggattacaggcacacaccaccacacttggctaatttttgtatttttagtagagatgctgtttcaccatgttggccaggctggtctcaaactcttgacatcaagtgatccacccacctctgcctcccaaagtgctgggattacaggtgtgacccaccacgcacagcctagatttttttaaaaaacatacaaatgagacatgtagaaaggaccatgaccttagaatgaaggtgctacacagagtagggggtaaagattgggataccaagggtagggggacatgaggctagggctgacgaacccagccccaagggaccaaggacaggagcagataggaagatggaagaaattgcccagggcaccctagcctggagtctctggtagagctccaagagggagtggttggagttggactcaggtgacacataggggtgacactgctctgtgagtgcaagcgtgaggagtgaggccagaaagaggctgcccctgaggaaggaacattgggcattgagatcaaaatgagatggtgatttgaggaaaggggaactgggggtggacatcacagatgggtgttcagctagaaggagcagcagcatgttccaggcctagaggcgagggacagaacatgctctggaaaggtctgcaatggctgggattttggacactggtgctgggtagctctcagatcaagcaaagccttgtaaaacaggaaaagcatctgggctttatttggggggctgtgggaatgacataatcagatatgtgtttagaatatttctgctgaggtagtgcaagaggcagggagacctacagaagatattgcattaatacagaaagaggatgatggtagttgtgaggattaagggggctagacagattccagatacattttggaaggaggttggacaagtcttgcctactgcttgggcttgaggagtgagggatgagcaaggaggaaatggcctccaagtttctggcttgtgggcccagacaaagttgagggccctttgcaatgctctctgcctccatcattcgcagcctgcccctgccctgctcgccacctttgaatctctcctggcgggcactgtttcttggtctgctttttctcctctttgtgggcatctcagtctcaagttttgtgtgtctgttactcagactctgtctctcgctctctgtctcaggtatttttctatgtctctgtctctttctgagtctagcttcacatgtctctagctcagtcttcccagccctttctttcaggagctgggcctgagggtggtaagtgtcctattggaaaagaagtggaagttggatttgggcagagattcgtggtgattagtaaagtggaaatgaacctgagcccacccacaggtctctctcctggggtcaccttgggacctagatgaggttcctccaggcagcagcccttctctcctactgggaaccaggcccagagtctgaaatcagttccaaagagccctgtgctagcctaggcaggccaaaccactcccacaccaagtatgtatcggatgcccttattgtgccaggctagggccacatgcagtggacaaaatacccttaaggggctcacagcctaatggaggaggcagaagagcaatcagagggtggcacagagtagaactgatttattctccagggagtccccacagaggtgatgatgctaacagtgtcatttccagagccttcagttcctggatgagcggactttttcatctacaatctccacagagaaggctgtatttgaggagaagtaggacataatgacggaggaagaggtggaggtcctgaagaccaggttgagtttggaatttaacctaagggtaatctggagccactgagacctcttgagcaaggaacaggcaccagttcagaaactagttaagatctgaaggttaaagtcaaaactcagaccagcttaagcaacagtgggggctctactggctcatgtaatcaaatcacagttacatgcctgggctggagtggcctgcgagtagcatctgaagcaaggagatagagatctctaggggaaggatgtgacctccagctactacttttccccataaccgggatgatcaaggtgttaggaaaggcagaggacatccttacacctcaagacaccctgtattccccactcagcttgttccaggacaccatccctaagggatccccagaagctcatccttctgccttcaacacccataactcccatgcttcctcaacatcctgatcctttcttaccaagacccactctcccccatcacacatggattcttccaatcaaatgtctatgtccactgacacctggcttcctagccatcttctacctctacccttgtccccagggatgttctctacttgtccccaggtgggacctggggacagcatccttcccatctaaagacacttcactcccaagaataaggctttcaaacgggtcagtggtccagcaggtgcagcccgccccctggtggccacaatgttgtgtggtccttttcctgagcccagctgaatgtggaaggcctctctccctgccagttcctcagtgtacaccacagtcagagtgggctcagtcgtgtctcttaccttacctgtcatgatttgcactcttgttcagttttccccagagtattagcagaaatgccctcaggaggctgggcgcagtggctcacacctgtaatcccaggactttgggaggccaaggtgggcagatcatttgagatcaggagttcaagaccagactggccaatgtagtgaaacacccgtctctactaaaaatacaaaaattagctgggcatgatggcgcaggcctgtaatcccagctactcgggaggctgaggcaggagaatcacttgaacccgggaggcggaggctgtagtgagctgagatcgcgccactgcactccagcctggcaacagagtgagactccatctcaaaaaaaaaaaacaaaaaagaacgccctcaggaatatgaaggcctgagtgcctgtctggagagggtagaaagcaggggaactggagcgatgtgccccacttggcagccagtcttggaggaggaaaatgaaaggcaaagtggatgcaagccactggtgaaggaaaaaagggcagtcaaccagggtcctgggcacacagagaaaagggcatctggcctaaagctggtggtcaggagatatttggggaatttgagaacaagacacatcctgatctgagatagactctaggaccttgggaatgagctgaaacattcttagcgtacccagaaacccaagaagccttcctggagggggacacgcctgccaccacttctgtacctccaaaattacagccctgccttacccagagagtttgggtgcaaaaagaggacatggcctcaggcttgggccctctctgacagccccggctgggggagggcatggccctgccctgaaaccctatcacaatagaatagctcccagagcagagggggcagggtatctctgtgtgccctcagcccactagcaggagtggctttggctcctgaaagggcagagagtcacagagtctcaagttgatttagtgactctggagccattgagccccttgaggtggaaccccacacttagcccctgtgtggattgtcccttggatgactccccatatctcagctagcaggtatcatgtggcctggctgatggaggttacttttgcttggctgctgtcatctgtcgcctctctcagccaggctccccaggccctgggctctggcccagccacaggtaccccctttattccctggcctatgcctacacaggctgtattggagctgaggtgagcagacccagacgtggccacactctgtggtgtgaattctatgtcacccgtcatcccaaggctgcctgctgatgaagaggaagggccaacccatatgtgcatcactgcatgcacccgtgtatatattaggggtccatatgcgtgtgtatgcagccccttctgggaaggtagttgccctctcacatcttttatagcatcagctttgacaggcagctgccatggcagacctcccactggcaccattcacatggcggtgccttggctgggcaagggagatatttcacgggcaggtctggtcacagacacacaccttggtacgtgcagctacatgctcatttgtacttgggctcacacgtgacaaggctgtctctgcccaggctggtttctctacgttggcactgcctgtttctccctccctccctcccgctctggccctccaggtctcagccctgacaagcactgccctcctctttcagctcccctggaacccagcctcctaccctcttggtcttggaaggttctcagagcctccctcatgaacatgatcacagatgagcatttgtaggcaatttctacttttcacactaacttcccagaggcctgggtagagagagagctgggctctctcctctggaacaggggtcagggtatgggagggaagaatacaaggaggtggccaggggccgtggctcatgcctttaatcctagcacttcaggaggctgagacaggcggatttcctgagctcaggagtttgagatcagcctgagcaacacagtgaatcccatctctactaaaatacaaaaaattagctgggtgtgctggcgtgcacctgtagtcccagctactcggaggctgaggcaggagaattgcttgaaccttggaggcggaggttacagtgagccgagattgcaccactgcactccagcctgggcgactgagactccttctccaaaaaaaaaaaaaaaaaaaaaaaagaatacaaggaggtaaaaaaaaaaatctcagtaaattagtcagtctgtctcctgactccactctccttccctctctcccacttccccctcccctgccacacagccctccttggttgctgctaacatacactcaggcgcccctgatgcacactgttcccctcccccatacactgccaacccacattcctaaatggggctcttaaccccagtgaactgtccccatctaccccatctggctctgatcccaccatggccatgggaggcactccttgtgatccacacctgagtgcctggctgggatgggtggagaaggaggccctatctcagctgaaagaggcaacaggcaagtggcctcctctctctggaccttcctttctaggcaagaacacacagatgatggtttgttgccagaaggctctggaatgggtgcaaaccagaaggggttccctgtcctggtctgagtttagggatgggaccaaagaagtaaaatttctggacgttctactaaaaattatttttaaaatatcaaaagcaaaaaatattttggggaaacggatactagccacatggaattgactagacgttgagagttcacacagcttgttaatatttagtgtctttctgactccctgatggcccttggtaagagaaaagaaggagggtggttgtcacccatcctgcctgtttactgcacaccaagctgtggctgggtaccgtgtttccaaaggcgagaggctcccttgggtgcaggaaatggagaccatgtcagggaaagatcagcatgagggtcctggagtgagagtctctgcccatccaaggcctcacaggaactcagctcaaaccataaagaaagctattatatcacctggcaggcctcagggatgacctcaggaaactgggtctttcaggagcaaggccactccagactaaactcctgttactccagacaagtcatttgtcatgaatgtgactcagctgcatctttcatcactgcttcagtttgggtctaaccatttgtcctcttgttaacaactcactaattttcataagtcccagtttaaatctgggagacagtctgtttgccttagttcattccgatttttcaagttactatacttatgtaaaaaattacccccaattttagtgacttttacagaatcaaaaaatacttatatgcttatgaatctgcagtttaggcagggcttggtgggcctagctcatctttgctttctgtggggtcacctgggctgcttgatagtgggagctggactgatctggaggcttactttctcgcatgtcacagttgatgccggctgttggctgatgctttgggctgttggctggaaaacctacaaatgctattgaccatgtcttttattttctgtactctgatgttttgacatattggggtcttgtttttggcatcttggggccttgctgaccttggagggactgcccctttgatagcagattcctagagatagcaaataactgacctgtgagggtgtctttcatatgcaagccagtcaatccagtgcccacattcccaaccaccccctttatccagcaattacaggcccctattttcctgccctagtcacccaggggccaagtaccagactactggggccagcccctacacctcagagcccaccaaaattatttaaactagctaatcctgaacctgcttaccctgttcctttttgtagaaaccacactaaatgcctttgccatagttttcctttctccctcaggttcctgaccaagctggtgcttctgcgtgtgttcctgcatgacttggtgtgtccccttctcttggatctgtgagtaacaaactatcttttctttttttcttttgagacagagtctcgctgtgtctgtgtcactgaggctggggtgcagtgatgcaatctcaggtcactgtacctccgcctcctgagttcaagtgattctcctgcctcagccttccgagtagctgggattacagggatgcaccatcacacccagctaatttttgtatttttagtagagagagggtttcaccatgttggccaggccggtctcaaactcctgacctcaggtgatctgcccgccttggcctcccaaagtgctgggatttacaggcatgagccactgtgcccagcctaatctgtcttttcaatggcagtcgtctcttgacctgttggcctcttcatacctgaataataataaaacctatattttcttttttgtttgtttgtttgtttttgagatggaattgctcttgttgcccaggatggagtacaatggcgtgatctcagctcactgcaacctccgccaccagcctgaaacctatgttttcaaacagtgatctctccagtggcctgggcttcctcacaacatggtggctggttgcaagggtgtgtcctctgagagagtcccaggcggaagccatatcacattttatgacctagtctcagaaattactcagtgtcttttctactgcattctgttcaccaagactatcataatgtcccacctaggttcagggggaggagaaatagactccatctcttgaaggggcatggcaacgtgctagaagagcctgtgaatggaaatactgtggtagccagttttggaaattacagtcttcaacgatcatcctctctgggcagagctcttcatgccaggacacctcataggtcactggccagtcaatggggtactgtttacaggtcagatatctaatcctgtcccactcttgcccttagacctgagcaaaagggacgcttgccctgggcctggtgctttagaagtctttatttaggcctttgtccagttgttcccttccccatggggtaagaaatttgcaggacaccagggcatgtggctacctgaagtctgtgcctccacctcccctgttacgaaatgcacctggggcacctaggaccttggaatttcctatcccacaggcttgagcatggggcccacacatcaggggagagcagtgaggcagctgtgagccaggagcctgggcttggctgtccctgtgttgtcacactccggtgcagcactccaaggaatctgttcgtttaaaattcgaacttggtcattcagcctcagattttgttgcattttcctgatttagatggaatggaatgaagaaaactccacagcatacagaattggcctccatttgctctcttgtcctgcaaatgtcagaggtgggcctgccctgacagctgtggaggggggcatttcctgaggtgtagagaagatcccccttccctttcctcccagctttgggtagagcctgaggcagctggaggtgtgtcaagccctgtcatggcaggactctgtcttcaccagtcttcacaacctctctgttaataatgccatcttacagatgaggaaacaggcttcacgaggttaagtggcttgctccatcagagctgagatggtgatgattgcctttgtgtcggggaatcctatctgtccgggaagccgctgctcaagatgacagggcaagtcattgattgggagtttccagatcttaactctaagctcccgccactcctgcatgctgtgcttaaagcaggatggcgtaggaaatgattgtactggatttatctgaggaagggaaggcattgacagaaatctagaaaattattctgggataagcataatcattagtcaaacctcctcagcctcatttttctggagatgaggttacctggacgaggagcacgtgatcaggggctaagacgggtacttttcctgcgtgctggatagggaggcctgaaacccagaatctactagatctgtgctccttgggcttccctgtccttaggaagctaaatttacaactccaaactgcatatctattggactattcccagagagatgttaagagatacagataaatagcaagagattaagacacaggcccaggccgggtgcaatgactcatgcctgtaatcccagcactttgggaggctgagatggacagatcacttgagccctggagttcaagaccagcctgggcaacatggtaaaacctcatttctacaaaaaaaaaaaaatgcaaaaaattagccaggtgtggtggtgtatgcctgtagtctcagctacccgggaggctgaagtgggaggatcacgtgagcctgggaggtcgcaggctactnnnnnnnnnnnnnnnnnnnnnnnnnnnnnnnnnnnnnnnnnnnnnnnnnnnnnnnnnnnnnnnnnnnnnnnnnnnnnnnnnnnnnnnnnnnnnnnnnnnnttttttttttttgtgctgtggcggcccagggggagccaggaaggaagggagagagaacggagaggggagggagggccgagaaggaagagaganacagagcgcagagcaggggagagggagggcggcggaaggaaggaagggaagngtgaggaggcncgccgaagccgggcccaaacacgccgtcaggccctgcaggtcagaccatggatcctttttgtgctggcagacacctttgaacagctntcagtacctggtattccccagcacacagtctggaaaacactacaccagatgcattttagaaggaacaaacagcttacgtaatatcacccgcaggaagtccatgcattttgaaaaatgtctccacaggatgtttttcttgccagtgttttctctaatccgaggggtcctccaagcctccccagccctgtgagtgcaggtcacacctacccagggacagactgccttggggtcacaatggctgattcttcagcacttctaactcagcttctctttctttctgcctttcagatgggcttctttcgccgaaggtacaaagaaattatcgaagctgagaagaaccggaaagagaatgaagacagttgggactgggtccagaaaaaccagtgagctgccacaccagtcacatgacctgatcactagcctgtcatccttggtctttgtatcttccatatttggaagaaaaaaatcttctccagatttttcggaggccccactgatgctgttctcttcttcattctatcaagcccaggtgccagcctgaggcagccacttcggccaggtcacacgaccggggccagcaccacttc

SEQ ID NO: 1972 - protein, 745 aa, Homo sapiens
MLVARRQQRVEKGESGDGSELPLLPPRLQHLHNQLNTPRHMASLSDTQEGTHICTHRFVSLRQPLHTHTGSVGTRTLAASLSSGRTPHPRTLRALCTPPPGPCRRPAVNSSGAGCALAPSPRPPAPLLTFLARARQPALVLLGVGHLGDDGRAVHGCAARRPPAGPAPRKPSARGRGAGGAGARRGGALAAAAWARPPPGPALWERRPGPAPQLPPPPPLGSSGRRLVTMNPGAAPGRAAHGEAEREARRRWKRERAGEGEGASEGGRAGGRERGREGERKGGKEEGRAGGCVPARGPASAAGSARSPARLVGERGAGPTQGEWRAGGGGRARGGPGQLSGGAVWEPGGRGGMAWRQERGRGPEEGYLPRGGAGSAGGGAVRVSREGAGRGASRRGNRGAWDVSAEGSGVQKWGLPRSGSDTQTARRGARARRCCDGDRGAWGRFGEAQGCAPQLEGSQELAGSGVICAERESSDRARGSGCSDAGGTRVSIRPQSPREGRRVLKDQPPAREGVVTERGLSSGHFRVLCSKGTGGVRRGQKSGRRWWQTKSGRDCACARQLATVAPSTTARAWERRQSASSAWERRGLWTPASCASNLQATLCSPEGLGGPTGRDVGGQGSVGGLRRRAACLRLLGCARTSGLAGMSSSSVASSRRGQTGSFSLPHISWILELMQSGPVLTGGTGEPLQSIKGHFRKSLWPVVSPQTSVVSVPMGFFRRRYKEIIEAEKNRKENEDSWDWVQKNQ

SEQ ID NO: 1973 - DNA, 1767 bp, Homo sapiens
  source (1)..(1767)
  CDS (201)..(309)
  CDS (693)..(1567)
  modified_base (588)..(687): a, t, c, g, unknown or other
ttcagaatatttttacttaaagcagttttcaaaactcgatgttttccagtttgcttggctgcatccacgtctcaccttaagcagcacacccctccgtcctcgggagggaagcagtgagtttggttctgtgttgtgctccctgttgtaccagtgcagtgctcggcaaaccccaggtggaggagtatggcccaagaatgtagatgaactgggaacccctcccttgtctggatgcagctgctctgaggaaacaatgctggccgcactgcccggaaaaaggcgaggctgcccagcccagcgctggtcccgagggtgttctgcaatgatggaaacattgtatagtttgtatcttggctactgagcccttgaaatatggctaatgatggagaagctaaagctaattctttttttttttttgagacaagagtttcgctcattgcccaggctggaggcaatggcacgaagttggcttaccacaacctctgcctccccggttcaagtgattctcctgcctcagcctcctggatagctgggattacaggcggcatcaccacacctggctaatttttttgtatttttagtagagacggnnnnnnnnnnnnnnnnnnnnnnnnnnnnnnnnnnnnnnnnnnnnnnnnnnnnnnnnnnnnnnnnnnnnnnnnnnnnnnnnnnnnnnnnnnnnnnnnnnnncacaggtacacagcagggacgtacgcactccgggtacacacgcaggggcacattcacgcggggtattcagcagagacacgtgcgtgcggggcacagagggggccgtcacgccgggtatccagtacaggcacgtccacgccagggacacagcaagtacagagaggataagcaacaggtaaccaaggggccgcgggacttgggcaggcttggagatcccgccctgtgctcatcccaacccggcgacaaggtggtcccctccctccagccccggcgcgcactgcccgcactgcagcgtccgcacagtggacaaggcccgggaccacagtgggcgcccccattgtcctccagcccgctcaggctcaccagctccccgcgtgtctccgtgggtgctgcccgcggcgcccggcgttgcgagtttttacacggctggctggctgcagcaaccaaacccaaactcccagcgcgccgcgcaaccacaacatcggcgtcgcagtggcaacggctgaacggccaaccggcgggcgcggctggagcactgtcacccaataggggaagcctgaggcggagcggtcggccaatcacggcaggaagcggacgggcgcgccgcctgtcaactgcccgtagcccagagccggaccagggcagggcagcgcagcgatgccacggggaaccgggcgggacgcagcgggggtgggagcagggccttactgttgcaggggtgtgggggcgtggggacgtggggacgtggacgcaggaagagagtcaggcctcagtcctcctcatgccgctctggctgggaaccacagttactgtagagcggtccagaaaaattggggacatgcatcacgttttccaaataagtataactgtctcaccctaaaaacacaacaaaacaaaacaccccaccagtatacaaaaataaaacataaaaagaatttactaatgagatgcaggagtaatgattcacttagtaaaggaatccttaattttagacaaatttgcttgcaaatttctcatctaatgcatttttttcaagactaataagtatttggaaattgtgtgtcgataataaaattatca

SEQ ID NO: 1974 - protein, 327 aa, Homo sapiens [sequence omitted]

SEQ ID NO: 1975 - DNA, 1447 bp, Homo sapiens
  source (1)..(1447)
  CDS (201)..(446)
  CDS (597)..(764)
  CDS (1047)..(1247)
tgtctgatcagacccagagagtcctttaaaaaaataaaaagattctatcgcagtggaaactgaacaactttttttctaagacgaccacccctcgggaacaaaagttatatttcagtcacatgttgggtgtaggaatagggagcaggttttttttttttttttttttttttttttaagcgcactaattacgggggtgttttacggttctggagacaatccgggttgctctgaccaactgtgaccggcatttcattgtcaaaaagcaagggggtgggggccgaggagccggcaggggctcggcggtgggggggagtagcaaggttacgctaaagggtacagcagccaccgcgagctgcatctccttccctcgcgccccaaataatttcctgcgaacagagcaactgcaacagcctgctctgaggagcccagcacgactgccctggccggtgcagctcagggtttccaccacgtagaaggaggggagaagatttttaccttaatgctacactgagcaggagtctcagacatgtctcacagcgagagagatcaggaagttctcaggttttttccactttcctttcctctccccaacccagaaaggctccacggccagccagacgcggtcatttaagaagtttcttccagcatctctcccggcagccgccccgggggtctggagcgcgcggggcggggcggggcggccggcggagttgggcgcgcggggcggcgggggcgtgggagacgggcccgagcgcggcggcggggtctgcaggtcgcggcgcggcgcggggacccgggacgcagcccggccggcctcccggtctctcctcccacccgcagccggcgcttttttcccccgccctcccgcggctctccctcgctctctcgaatgttttccttcctggaagagagaaactgaaaggcagaactgagaaagctctttgctcattgatcttgagagtttcagtgcagaaactgacgtgaattcccagcactgagctctgcctcttaaaggagccaccaggaaataaaagctcgggttacagcccggcatcggggaaataaaagctgcgcgggggaggggcggccgcgggggcgcgggcggaggaaacccgggtagcggggccgcgtggggccgcggctgcgagcggggcgagcggcgcagccccccaggccggcccccggtgcgggcgcccgccctccacgccgcgagacctcccgctggccgagccaatttccgggcttaaggaagacacctttaaaaaacgttacattgtggccccagacaccacaaaacaggttttattaaactcctcccacctcccctggctccgtctcttggatacatcgatgtgcacaagggttttgaaacgtttcactaagcgcagatgcaacgaaagtaattatctatgaagggccattccggttaggacgcggaatccgaagg

SEQ ID NO: 1976 - protein, 204 aa, Homo sapiens
TVLETIRVALTNCDRHFIVKKQGGGGRGAGRGSAVGGSSKVTLKGTAATASCISFPRAPNNFLRTEQLQQPALRSPARLPWPKGSTASQTRSFKKFLPASLPAAAPGVWSARGGAGRPAELGARGGGGVGDGPERGGGPGIGEIKAARGRGGRGGAGGGNPGSGAAWGRGCERGERRSPPGRPPVRAPALHAARPPAGRANFRA

SEQ ID NO: 1977 - DNA, 13904 bp, Homo sapiens
  source (1)..(13904)
  CDS (201)..(259)
  CDS (1585)..(1698)
  CDS (2500)..(2653)
  CDS (3320)..(3412)
  CDS (4412)..(4670)
  CDS (4917)..(5078)
  CDS (8240)..(8328)
  CDS (8481)..(8635)
  CDS (8738)..(8836)
  CDS (8920)..(9051)
  CDS (9131)..(9236)
  CDS (13657)..(13704)
  modified_base (31)..(130): a, t, c, g, unknown or other
  modified_base (5375)..(5474): a, t, c, g, unknown or other
  modified_base (13901)..(13904): a, t, c, g, unknown or other
tcccaaagtgctgggattataggtgtgagcnnnnnnnnnnnnnnnnnnnnnnnnnnnnnnnnnnnnnnnnnnnnnnnnnnnnnnnnnnnnnnnnnnnnnnnnnnnnnnnnnnnnnnnnnnnnnnnnnnnnaacatgacatgcaggcagggttggagtaggaactgaactcttggtataaaatagtaaatgatggctgggcatggtggctcacgcctgtaattccagcactttgggaggcccaggcgggcagatcacgaggtcaggagttcgagaccagccaggccaacatggtgaaaccccgtctctactaaaaatacaaaaattagctgggtgtggaggcacgcacctgtaatcccagctacttgggaggctgaggcaggagaatcacttgagcccgggaggtggaggttgcagtgagccaagatctcatcattgtactccagcctgggcaacaagagtgaaactccatctcagaaaaaaaaaaatagtaaatgatgataattgcctgcatctattgagagcttagtatctcccaggcactatactaaatgtccaacctacattgagtaatttaatctttacgtcaaccttagaggtagatatcatcttcagttgacagatagggtatagaggagtcaagtcacctgcataaagtcacagagctagtaaataaaaccaggatctgaatcctttaatctggcccatgatctgaaactttacactgtaccacatgatagctgccatttttttgagcccctacaatgcgccaggcactatactagtactttatagacctctcaacagacattccattttacaaatgaggaaactgaggtttaaaaattcgaagtaaattgccaaggtcctcatggtagaactgggatttgaacttagatcttttcaacttcaaaacatatgttttttaccgtggtatgctgactagctatatgcatgaataaggacttccttttaacatctgagtttggaaatgagtattttcttaacttctaattccttgtttaaaaattgtataaaatggctaggtgcagtggctcatgcctgtaatcccagcactttgggaggctgaggcaggaggctcacctgaggtcaggagtttgagaccagcctgaccaacatggagaaaccctgtctctactaaaaatacaaaattagccggccgtggtggcacatgcctgtaatcagagctactgaggaggctgaggcaggagaatctcttgaacccaggaggcggaagttgccatgagccaagatcatgccattgcattccagcctgggcaacaagagggaaactccatctcaaaaaaaaaaattgtatgaaatatccctaagtatagccaaggagataattcatttaaagaaaaccccatcaaggaaaagtaagacatatttgaaaccctttcatctagcacatagcaggcactcagcatgtagagtcaaataatctacttttttccatctttatcatgcaggagaagtcattagctctcttaccattttttcctttagccctttaacaaacatttatttttcttcttcttgtttctctctctctttcttctaagctacctggcctatcgaaactttatgattgacacttaccgactgaacccccaagagtatcttacctctaccgcctgccgccgaaacctagcgggtgatgtctgtgccatcatgaggtgggtcttgtggctgaggggaagggggtacatgaggatgcctgcctatggatgtgttttggcaacagtagagatgccagcaaggaacacagaggagcagacagaaaaaagcacctctagagaaaggtgaagtacaggtttggggaatgaatgacttgagggattagcaatggcattctctgaagtgtagaatataggacaaagaaggagcatgtctgtaattgaaagatactggttcaggccaggtgtggtggctcatgcctataatccaaacattttgggagaccaaggtgggaggattgctggagcccagaagttcgagaccagcctggacaaaatggcaaaaccccatctctagagaaaatgcaaaaaaattagctaggcatggtggcacgtgcctgtggtcttagtgactcaggaggctgaggtgggaggatcccctgagccctggaggtggaggctgcagtgagcggtgatcacaccactgcacttcagtctctcttagggaaaaaaagaaagaaactggttcagttttactagctattcaggaagaaatgttcggtaggtaggtagatatagagattggcccaggctgaagatgtagacttgggtgtcactggcatttaggtgataaatgaacaactggagtaggtgagatttcttaaggagtacaatgaacagaggaaaaggccggggttgggtggggagggggtttatgccccttctaccccccacttttcctcttcctcgtgcacctttctggctatccgtgtgaccctgtctctgcctctctctgcacagggtccatgccttcctagaacagtggggtcttattaactaccaggtggatgctgagagtcgaccaaccccaatggggcctccgcctacctctcacttccatgtcttggctgacacaccatcagggctggtgcctctgcagcccaagacacctcaggtagggtgaggtgctatggggatggggcgggttgggaagattgggcttctttgaacttttctttttctggtttttagggtaatggttcaggagtgttttgaggcttcttccttttccatgggatgcaaagggtcacgggaatcagccccatgtgtttagcatcctctctcagcctttgtacctaaggctgtaattgctgagggagaagagattatccttttactcaaggagtagacaggctaatgtaggggagtcaatagagaaaaatggcttaaaattaacttgcatgaaatttttaaactttgtcatctttgccacattttttcatttttgcctcataattatcatcttcatttttttttccatttccacttcatccattacaaaaattaggaagaaggttatgtggcttgcccaaggtcacagagtaccaaatctaggattagaacctaattgtccagctcctaagagaacctataaagataatgtgaatatgtatggatatcatgccaacgacatgtcttattaatcatgaagggaacatggaacagtggcatgagtgcccccagagcttgtgggccgcccagcatatggtcttgaggcctccagggccttggcctggtcatttcctgcccagcctccatgacgccaagctctgtcccccagggccgccaggttgatgctgataccaaggctgggcgaaagggcaaagagctggatgacctggtgccagagacggctaagggcaagccagagctggtaggtggggtgcagaccctgctgggctgctcattttcccctttattggggggcccctgcccgggaagaagagacatgagagcagaggaactacagcagtaagggaggaagtcccacccaggggtgtccctggctttgggaaagaagctccttctgtctgttttttctctctgtcagcccctggctcccggtggtcacttgtactcacctgtttctttccctccacaaatagcagacctctgcttcccaacaaatgctcaactttcctgacaaaggcaaagagaaaccaacagacatgcaaaactttgggctgcgcacagacatgtacacaaaaaagaatgttccctccaaggtaggaggtgcgggccgactctaggggtagagaatgttcgctcctcagaggtcacaggctcctttcttctcacctgcctgtgtttcccctgcagagcaaggctgcagccagtgccactcgtgagtggacagaacaggaaaccctgcttctcctggaggtaattggggcaaagaaaagagagtttttctctgaaaacagaagtgggctccgtgtagaggctcacgcctgtaatcccagcactttgggaggccaaggcaggaggatcacttgagtccaggagttcgagatgaacctgggcaacatagtgagactccgtctctacgaaaaattttaaaaattagccaggtgtggtggcacacacctgtggtcccagctactcaggaggctaagtgggaggattgcttgagcctaggaggtcaaggctccagtgagcttcaggaccagctccaggctggggatttgggccatttcattaacttcatatcctttcttagtgctacttcaagatcccccttggacctagcagagtacacaaataccagaacatagagaactttgaaaccagctgcccttagtaggatggggggagtcagccttcgagaaaagtggctaagtaagcggagttatgtctccaccactaccaccaggcactggaaatgtacaaagatgactggaacaaagtgtccgagcatgtgggaagccgcacacaggacgagtgcatcttgcattttcttcgtcttcccattgaagacccatacctggaggactcagaggcctccctaggccccctggcctaccaacccatccccttcagtcagtcgggcaaccctgttatgagcactgttgccttcctggcctctgtcgtcgatccccgagtcgcctctgctgctgcaaagtcagccctaggtaatgggggtgggtggttccacctggccttcttagtttgcttttgaagggctagttactcagactgtgaatcctctcaagtttggctgccctgctggccttgtctgtgcgggcctcagctcaggcacctgtctaggctccatactagcttagatgaagacatgggcttgtgagtaagcttttgcagggattgccagaactgttccactgtgccgctcccagcctcattctttctgggtcttgcagaggagttctccaaaatgaaggaagaggtacccacggccttggtggaggcccatgttcgaaaagtggaagaagcagccaaagtaacaggcaaggcggaccctgccttcggtctggaaagcagtggcattgcaggaaccacctctgatgagcctgagcggattggtaaggccaggcaggttcccagatttcttgcctttcacaagatccagagctacctggcctcctgtgccatttctgcctcaagttggcattagagcacaacatgaatgagaacattggtagggtttttattttccccatgagtttacctcaggggctctggagccctactagtcctctcatgaagattttgggtagaaaaatctttgcttgtagaaggggctgttagaaaagtcttgtgaaggccgggcgcagtggctcatgcctgtaatctcagcactttgggagccaaagtggggnnnnnnnnnnnnnnnnnnnnnnnnnnnnnnnnnnnnnnnnnnnnnnnnnnnnnnnnnnnnnnnnnnnnnnnnnnnnnnnnnnnnnnnnnnnnnnnnnnnnagttaaaccaaggtcttcttaggtcccgggtttagtaagggaaacaaatccggtgtcttcttttaatgggccataaaatttgggggtaaaagtgatccctgaatgtgttcccccccatcaagtgtcctggtaacccttgctttttaggtggggtgatcccccacggcccattttggaattaaaaagggggggtaaggcaaagcccctcctttaaaaaaaaaaccttaaaacttaaagtggggttaccatgtggatttttgaaacccccccatgataaagtttatttttttttggaccccaattttttttttttttttgagatggagtcttgcccagtcaccagaccggagtgcagtggcgcaatctcggttctctgtaacctgcgcctcctgggttcaagcgattctcctgcgtcagcctcccgagtagctgagactacaggcgcccgccaccacgcccggctaatttttgtatttttagtagagacggggtttcatcgtgttggccagaatggtctccatatcctgacctcgtgatccgcccacctcggcatcccaaagtgctgggattacaggcgtgagagccgcgccccagcctaagggtagatttactggttctttcggaccacgaaaagaagagcaggaaaactctttaggctgagaaaaaaaatggaggagagagaaggcatatttattatagatcagagaggcaggcagagcaagatcataggagctgttgaatagtatgctagaaatatggattttatcctaaggcttagggaagcctttgtttattttatttattatttttttgaaacagagtcttgctctgttgcccaggctggagtacagtgatacgatctcagctcactgcaacctccctcctgggttcaatcgattctcctgcctcagcctcccgagtagatgggattataggtgcccgccaccacgcccagctaatttttgtatttttaagagagacggggtttcaccatgttggtcaggctggtctctaagtcctgacctcaagtgatccactgcctcggcctcccaaagtgctggaattacaggcgtcagccaccacacccagtcagggaagcctttaatgagaggtcacatatccagatttgcattttgggaagatcatagggataagagggtaaagaatggactggagagggacaacactgggggcagggagatcagtgaggagactgttagagcagtcaaagcaggaaacgactaaagcctgatgggatttgaagattgctgtgatatggagcaggtggaggagcaaggaacagcctagacactaactctggggtttttggcacagggtggctagatggataagggtgccgttgctgacttagggagtgcacagagagggaattttggaatttgagatctctgcaggacatccaagagaagacatgcagaaaacaaatctattgtccatgaggtgttcctcccttgccctcttattggaacatcatgagcaagcaaccactcataagtgtagtcatgggtgagatctcttaggcagcgtggagagtgaggagacaaaagatggccatgagccatcttacaggtgtgaaccactgtgcccggctgaaattaatagaatttaaaataatgtaacttaatgctagcagagtagaaaggaggtacaaatgagctcagttcttcatcttttatagcagggaatcaatagatacaagcatattagaattccgtgagaacaaagaaaacaggagggttttaaaggttgttacatttggaatatggcaataggagtaggatgggcaagaaacatttacttttagttctgtttttactgttgttttctgtatgctgtaggtattactggtataatttctgaaagctaggttgggcgcggtggctcacgcctgtaatcccagcactttgggaggccaaggcgggcagatcacaaggtcaggagatcgagaccatcctggctaacacggtgaaaccctgtctctattaaaaatacaaaaaattagccgggtgtggtggcggacacctgtagtcccagctacttgggaggctgaggcaggagaatggcgtgaacccaggaggcggagcttgcagtgagctgagattgcgccactgcactccagcctgggcaacagagcgagactccgtctcaaaaataataataataatttctgaaagtttatgaggtaaagatggtccactctactctggttaagaaaggaaggacaggccagacacagtggctcacacctgtaatcctagcaatttgggaggctgaggtgggtggatcacctgaggttgggagtttgagaccagcctgaccaacatggagaaaccccagctctactaaaaatacaaaattggctgggcgtggtggcaggtgcctgtaatcccagctactcaggaggttgaggcaggagaatcgcttgaacctgggaggcggaggttgcggtgagaccagatcacgccatgcactccagcctgggcaacaagagcgaaactctgtctcaaaaaaaaaaaaaaggaaggaaggacagagggagggactagcaactgttaccatggcttccctgcctttctcaaagggaaatctcaccaaaccacctatgagtccaagcgtttggacctttaaaacaccaggattaactcatttgttgatgcattcgcctcttgatcatggtcctgttgccccacaggttcggggtgagggcactggcgtgctgggctcattatccctgcccctctcagagctcctcgtggctgaccagctctgcttggaccgctggtttacactcagcagtggtcaggggcaggtgctactgagagcacagctaggggtgagtgacaggagatggtgggcaggatgagagggaggaggggagggccttcacaggtgagggacacccaggagggtgggaacagagggccgtgtccttagagtgagggaactgagagaactctgcccagctcacagctttcttgcccctagatcctggtgtcccagcactcgggagtggaagctcatagccacagctacagccacagctcctcatcgctgagtgaagaaccagagctctcggggggaccccctcacatcacctcctcagccccagagctccggcagcgcctaacacatgttgacaggtaaagggctgggacaggaaggtgggacgcagtcagaaataaaaagtattacaggttcactaggctctagctttccccagacctactgatatttctccacagtccccttgaggctccagccgggcctctgggccaggtgaaactgactctgtggtactacagtgaagaacgaaagctggtcagcattgttcatggttgccggtgagaccccatccctcctgtcctccagatcgcctccatcccttccctcaggttaccatatcacctacatcctcctgttgtaggtcccttcgacagaatggacgtgatcctcctgatccctatgtgtcactgttgctactgccagacaagaaccgaggcaccaagaggaggacctcacagaagaagaggaccctgagtcctgaatttaatgaacggtcagtcagtgggcattcaggtggagagatggcaggcttggaaaggactcctggcccctaacatccagtcctaccccaggtttgagtgggaactccccctggatgaggcccagagacgaaagctggatgtctctgtcaagtctaattcctccttcatgtcaagagagcgtgagctgctggggaaggtaagagggcaggatggcagggcagaggtgagggctggaagctgctggcaccaaggttatagtccctgtgaggaaggaagtaccccacgtgatcctttagaggtgactcacctctgcaatggtttgggacgagtatgtgatgaaggaacatggtctttggagatttcaaaacagcatcatcagaatgagatcctgtctcaaaaaataaaagaaataacatctttcccctatcatcttccaacacaggtgcagctggacctagctgagacagacctttcccagggtgtagcccggtggtgagtgtctgcgtgggtgggggatggtctggatatttcagtgggagaaattccaatcacaggaaaggaaaaaaagatacaatctgagcagagaaccattgattctatcaagtagagaagcccttggatcgtgtctcatttataaatatgatgacacaagagtcatctttctacatgagccctcttttcacaggtatgacctgatggacaacaaggacaagggcagctcctaggagctggcgagtcccagcctgactgctctgtcttcctgccttcgtctcgctccatcaccgcctcaatgtgatgagcctaaagctagggtccaagggcagagcctgtgcccttcagccctttcacctaacaggcccatattcgggcctttgcctgaccaaagagaagaaccgtatgttccctttactgcacggcctttatccttctgggcccctggggcggggacctgagctggctgtttcctgctttgcctgcacattgttctcccttcctcccaactcctcagggccttctgtatctgtgcctggccagtggcagcactagcagtggtattagcttatgccaaatacagctttggaaggatctttttttctttaactagatggtcaccttcttccctaccacacatgggtgggaaggtggacaggctaacctctccagctgtgagcctcttagactactgcatgtagcaaatgttcagcagctcaggcccccatgtccagttctgtccccactgtcctcaaccctgtcctgaaaattctactgctttgatggctggggccagtctcttgtcactttggaaactgaggacgcgtggattctactcaagcctccaagtagtggcatatcagtcttggagctcctagctggtgatacggagagggctttggaggacttgggacagcagggccaatttttttgcccaagtgcctaggctgctaactcactgactagaacttaatctggtactttacagttttgcaccaactctgccaagccactggatcttacattaaacatcatactcaaaccagctgtggttcttttccttaaggatagggaatcaatctacccatctgatgtttattcctactgtcaaaagcctttatccaattcgtgaatcatgtcagtttaattaatggtcaaagcctactaaggttgcagccaccaagaatgttgaggatggtcaagagacctgtgtaaagtagctgctgttgcatttcaggtgagactcatttccagtcacagtgatgaactctgttacccatccaacttgtctgctgaccactataggctttccagggaagggattcctaaacctggtaaacctgggagctctgtgccactgcacaggctcctggtgtctctgtgccactgcacaggctcctggtgtctctgtgctgtcagggcatgctcagctacattcaaaagggcttcaggcccatctagcaggagctgagaaatacacccatttcgatcatctgtacaccttgaactctgctccttgcaagaactttcctggaatgcaagctagagaagctgtgctccatctgttctgccaattgaaaggagagagatggacagagtgaactactgaaaacagggtcactggcataggaacttggggatttcataactgactcagagagactttactatcgtctcttgaaaaatataaaccttccttaggatgctgcccactgggagaagagggaagactcaggggaaaggattcctgctcagttccacaagttgtcgaaatttgcttaattagcaaaaactgaatttaaactccacactgtccacaaactcagcctctatgttctcagtgacccttttgtattcactgctggttcctctaccatctccacttccttcccatcaaagtaagaggaccccaagccttggctttgagcaaggaggtcttatttatttgctccattccccaactccggctctaaaatcacagggggaaaaactccaaaaacagagcaaagaaaatttttaaggtctcttgtcaaatttctagatactggccacgcgcagtggctcacacctgtaatcccagcactttggaaggccaaggcgggcggatcacgaggtcaggaggtcgagaccatcctggctaacacggtgaaacctcatctctactaaaaatacaaaaaaattagctgggcgtggtggtggacgcctgtagtcccagctactcgggaggctgaaacaggagagtcgcttgaaccagggaggcggaggttgcagtgagccaagatggcgccactgcactctagcctgggcgacacagcgaaactccatctcaaaaaaaaaaaattctatggcgtgaacccgggaggcggagcttgcagtgagccgagatcccgccactgcactccagcctgggcgacagagcgagactccgtctcaaaaaaaaaaaaaaaaaaaaaaaaaaaaaaaaaaattctagatactagctgggcatgcagcccaaggcctgctgttctagctggcttcagataatacaacctaggattttgtaatgtgtgattttaagaaaacattcttgagctagtttatcacttcaagtaattacatttccagaaaactagaggacatggcacaaattcttccatcccagaagggtccctactctttcctaacctttttgagttcaatatatataagggaagaggtactactatacatattaaatacaagatgatggctaagtgtgatggctcatgcctgtaatggcaacacttggggaggccggccgaggcagaggatccagagaaaactaccacccttaaaaaaaattagccaggcttggtggtatgcacctgtagtcccagctactcaggagtctgaggcaggaggatcgcttgagcccaggagttcaatgtaatagtgagctaggctcgtgccaccactctactccgccctgggtgacagagtgagaccttgtctccaaaaaaaagaaaaaaaaaaaaaaagataacaaccagaaaaaagaaaacaactaaatacatacaagatgagacacaaaacacaattgcacatttatatatgaagatggaacacattttaagggtcattagtcacatgaattaaatatacttctgtcatttctcaaacaactgacttttaacacacatacacgatgcacaccttttctggagaaagatatgactgcatatggttacgctatcactgattgcaaatactatcctcttggaatgtgtttttattggaccaaacaacgtgctgtagttaactaggtgtggcaacacagttgtctacccaacagccatttcccctcttccctacatacagaatcccagaatgtccctggtggcagtatgccagccccaggaaattaatcaagatcccctttgctgaataatcactttcccttgcaagttgaaatgaccctgacccagttttggtcaacaagatgttagaggaagtcagggactgtagcatctaaagaagaaagccctcattgccccttcctttctgcgtaggttattggtatgaggatattatgtctggaactgcagcagccttttttttttttttctttttttttctttttgagacagagttttgctcttctcacgcaggctggaatgcaatggcgtggtctcggcttgcagcaacctctgccttcggggttcaaacaattttcctgcctcagcctcctgagtacctgggattacaggcacctgccaccatacccagctaattttgtattttgagacagggttttcatcacgttggccaggctggtctcaaactcctgacctcaaataagctgcccgcctcggcctcccaaagtgctgggattacaggcatgagccaccgtgtcaggccagcagcagctttttttttttttttttttttgagacagagtctcattctgttgcccaggctggagtgcaatggtgtgatctcggctcactgcaacctccaccttgcggatgcaagtgattctcctgcctcagcctcctgagtagctgggactacaaatgcccgccaccacgctgggctaatttttgtattttcagtagagacggcgtttcaccatgttgtccaggctggtctcgaactgacctcaggtgatccgtctgcctcggcgtcccaaagtgctgggattacagacatgagccattgcacctggccatgaagatatttatatacatctcacattatttccttaagtggggccaggcgccgtggtttacacctgtaattccaacactataatcccagcactttgggaggcagaggccagcggatcacgaggtcaggagttcaagaccagcctggccaacataatgaatgcggatctgttctaacaagnnnn

SEQ ID NO: 1978 - protein, 489 aa, Homo sapiens [sequence omitted]

SEQ ID NO: 1979 - DNA, 880 bp, Homo sapiens
  source (1)..(880)
  CDS (201)..(680)
tgcccgcactggcctcccaaagtactgggattacaggcgtgagccaccacacctggctttaggattcaggttttgctgttacattacttgccattcctttttcatcttttaacatctctcatctgcttgctttcttttttttttttttttttttcctgagactgagtctggctctgttgcccagactggagtgtagtggcatgatctcagctcactgcaacctccgcctcccaggttcaagcgattctcctgcctcagcctcccaaatagctaggattacaggtatgcaccgctatgcccagctagtttttgtatttttagtagagacagggtttcaccatgttggccaggctggtctgaaactcctgacctcaagtgatccacctgccttggcctcccaaagtgctgggattacaggcgtgagccactgcgcctcatctgctcttatctttcacattgactttgacgatttatttttattgttgttattgttgtctccttttcttttttcttttcttttctttcctttctttccctttccctttccttctcccttcctccctccctcccttcctttcttccttcctcggttccttttcttccttttctttcttttctttttttctggagacagggtcttgctctgttgcccagtctggtgtgcagtggcacaatcatagctcactgcagcataaaactcctgggctgaagggatcctcctgcctcagcttcccaagtaactgggacatcaggcgcacaccaccacacccagctcattttttttttttcagttttgtagagatggcaccttattatgtttcccaggcttgtttccaactcctgggctcaagagattctcccaccttggcctcccaaagtg

SEQ ID NO: 1980 - protein, 159 aa, Homo sapiens
MISAHCNLRLPGSSDSPASASQIARITGMHRYAQLVFVFLVETGFHHVGQAGLKLLTSSDPPALASQSAGITGVSHCASSALIFHIDFDDLFLLLLLLSPFLFSFLFFPFFPFPFPSPFLPPSLPFFLPRFLFFLFFLFFFSGDRVLLCCPVWCAVAQS

SEQ ID NO: 1981 - DNA, 1972 bp, Homo sapiens
  source (1)..(1972)
  CDS (201)..(1772)
  modified_base (975)..(994): a, t, c, g, unknown or other
  modified_base (1319)..(1328): a, t, c, g, unknown or other
atattttagagcaaggtattgggagcctctctttatgagccgtattaccttgggcaagtgacataacctctctgtgcttcattttcttacgtgtaaatggggattgtaaaactcataagattgctgtcaggattaaattaatgtatgtaaagcacttagaatagagctcggcacagagaaatgctacatatatattagctattactgccactgccaccaccaccatcaccaccaccaccaccaccatcaccatcatcatcataatcacagccaccaccaccatcatcaccaccaccaccaccaccatcaccatcaccaccatcaccgccaccaccatcaccatcatcatcataatcacagccaccaccaccatcatcatcaccaccaccaccaccaccatcaccaccatcaccatcaccaccatcaccgccaccaccatcaccatcatcatcataatcacagccaccaccaccatcatcatcaccaccaccaccaccaccatcaccaccatcaccatcaccaccatcaccgccaccaccatcaccaccgtcatcaccaccaccatcatcaccatcatcaccattatcaccatcaccaccaccaccaccatcaccatcattagcagctatttaatcaccaccaccaccaccaccatcaccgccaccaccatcaccaccatcatcaccaccaccatcaacaccatcatcaccattatcaacaacaacaacaataacaacaacaacaaccatagcaacaattacatcaccacaacaaccaccaccaacaccaacatcaccacaccaccaacaaccaccaccaccaccaccatcaccaccaccaccatcaacaaccaccactaccatcaccaccaccaccatcatcaacaccacacaccaccaccaccaccaccaccaaccaccaccaccaccaccaccaccaccacaacaaacaccaccaacaacaacaacaacaacnnnnnnnnnnnnnnnnnnnnaccaccaccaccaccaccaccaccaccaccaccaccaccaccaccaccaccaccatcaccaccaccaccaccaccaccaccaccaccaccaccaccaccaccaccaccaccaccaccaccaccaccaccaccaccaccaccacaaccaccaccaccaccaccaccaccaccaccaccaccaccaccaccaccaccaccaccaccaccaccaccaccaccaccaccaccaccaccaccaccaccaccaccaccaccaccaccaccaccaccaccaacaccaccaccaccaccaccaccaccaccaccacaacaacaacaccacacnnnnnnnnnnatcaccaccaccatcaccaccaccatcaccaccaccatcaccaccaccatcaccaccaccaccatcaccaccatcaccaccaccgccatcatcatcaccaccaccaccaccaccatcaccaccatcaccaccaccaccaccaccaccatcaccaccaccatcatcaccatcaccaccaccactgtcatcaccaccaccaccatcaccaccatcaccaccaccatcaccatcaccaccaccaccaccaccatcaccatcaccaccaccaccatcatcatcactgactactaccatcaccaccaccaccaccatcatcaccaccaccatcatcatcaccatccctgccaccaccattatcacccaccaactaccaccaccaccaccaccaccactaccaccaccactaccaccactgtattagtccattctcatgctgctaattaagacatacccgagactgggcaatttacaaaggaaagaggtttaatcgattcatagtacagcatggctggggaggcctcaggaaacttacaatcatggtggaggggaagcaaacacatccttcttcacatggtggcaggaagaattgccgagcaaagggggaaaagccccttataaaaccatcagatctcgtgaaaattcac

SEQ ID NO: 1982 - protein, 523 aa, Homo sapiens
  MOD_RES (259)..(265): Variable amino acid
  MOD_RES (373)..(376): Variable amino acid
ITATATTTITTTTTTITIIIIITATTTIITTTTTTITITTITATTITIIIIITATTTIIITTTTTTITTITITTITATTITIIIIITATTTIIITTTTTTITTITITTITATTITTVITTTIITIITIITITTTTTITIISSYLITTTTTTITATTITTIITTTINTIITIINNNNNNNNNNHSNNYITTTTTTNTNITTPPTTTTTTTITTTTINNHHYHHHHHHHQHHTPPPPPPPTTTTTTTTTTTNTTNNNNNNXXXXXXXPPPPPPPPPPPPPPPPPPSPPPPPPPPPPPPPPPPPPPPPPPPPPPPQPPPPPPPPPPPPPPPPPPPPPPPPPPPPPPPPPPPPPPPPPPPTPPPPPPPPPPQQQHHXXXXITTTITTTITTTITTTITTTTITTITTTAIIITTTTTTITTITTTTTTTITTTIITITTTTVITTTTITTITTTITITTTTTTITITTTTIIITDYYHHHHHHHHHHHHHHHHPCHHHYHPPTTTTTTTTTTTTTTTTVLVHSHAAN

SEQ ID NO: 1983 - DNA, 949 bp, Homo sapiens
  source (1)..(949)
  CDS (201)..(749)
tagccttgtcatatagtttgaagtttggtagcatgcttcctccagctttgttctttctgcttagaaatgccttggctatttgggttcctttttggttccatatgaattttaaaatactttttctaattataggaaaaatgtattgatagtttaataggaataaaattgaatctataaatttggagagtatacccatttttatgatattgagtcttactatctatgaacatggaatgttttttgcatcatctctgatttctttgagcagtgttttgtggttttccttgtacagatctttcaccttcctggtcagctgtcttcttaggtattttattctttttgtggcaatcatgaatgggactgcattcctgatttggctctcagcttggctgttgtttgtgtataggaatgctagtaatttttgcacattgattttatttcctgggactttgttgaagttgtttattagcttaagaagcttttgggctaaaactgttgggttttctagatataggaccatgttgtctgcaaacagggatagtttgacttactcttttcccgtttggatgccctttatttctttctctttcctaattcctctggctaggacttccaatgctattttgaataggagtggggagacaggccatccttgtcttgtgctggttttcaaggggaatgcttccaggtttttcccattcagtgttatgttggctgtgggttttcatagatggctcttattattttgaagtatgttcattcaatacttagtttattgagagtttttaacatgaagggatattaaattttatcaaaagccttttctgcgtcttttgagataatcatgtggtttttgtctttagttctgattatttggcaaatcacatttattgatttgtgtatgttgaaccaaccttgcatcccagtgataaagcctacctgattgagg

SEQ ID NO: 1984 - protein, 182 aa, Homo sapiens [sequence omitted]

SEQ ID NO: 1985 - DNA, 1330 bp, Homo sapiens
  source (1)..(1330)
  CDS (201)..(1130)
ggcaacggtgaggacactgacaccgaggagattggcaaacgttacaaatcagggcatcggtgtgtttctgtgtctgttttttgtagaaccaggtgttaagcatttaccatacaatactgcagacgtgggagggttttgagtgttacccagacacccccaaattcttctaacaagtcttcagaggttgaataacccaagccatgttacacagcttaggaaagaatgaagatgggtttaatccactgagtccagatctcaccatctctaccactagaccaggcagctctgtgtggggaagtgtgtctgtgtgtgcgtgtgtgtgcacaagtgtgtatgtgtgcatgtgtttgcacgtgtatatgtgtgcacacatctgtgtgtatatgcacaggtgtatgtatacgtgtgtgttggtgtatttgtgtgtgtgtggaaatgtatgcatgtatgcagtgtgcatgtgtgcatgcatgtgtgtgcatgtgtgtataggtgtgcatgtgtatgtgtgcacgtgtgtatgtgcacgtgtgtatgtgtatacatgtgtatgggtgtatttgcgtgtggatatgtatgcatgtatgcacgtgtgtgcatatctgtgtatgtgcaactgtgtatgtgtgcacgtgtgtatccatgcatatgtgtgcgtgtgtgtacatgtgtgtataagtgcgtatgtgtgttcccgtgtgtatgcatctgtgtctgtattgtgtggcatgtatgtgtctattgtgtgtgtatgcatgtgtgcgtgtatgcatttatacatgtgtatgtgtgcgcatatatggatgcatgcatgttgcctgcatgtgcacgtatcgggtgtgtgtgcgtgtacgtgttcacgaatatgcatgtatgcatatatgtatgcacgtgtgtgtaaattttgccgtgactgttttcctgtggaaaggctgaagtgtgcaggttcttgtgccttgtgggggggctggttcttcacgtatgtgttgtgtggctgtgcacaggttctgtgcctgtggggggctgttcttcacgtatgtgttgtgtggctgtgcacaggttctgtgcctgtggggggctgttcttcacatatgtgttgtgtggctatgcacaggcagaccatgctatagtcctgtagctgtgtggatgcgagcggagggggtagggcccaggaggccccatcccctgagctctactcctcctaggacatcctggacctggagaaccagcgagaaaacctggagcagccattcctgagtgtgttcaagaaggggcggcggagggtgcctgtgaggaacctgggaaaagttgtgcattacgccaaggtcca

SEQ ID NO: 1986 - protein, 309 aa, Homo sapiens
MLHSLGKNEDGFNPLSPDLTISTTRPGSSVWGSVSVCACVCTSVYVCMCLHVYMCAHICVYMHRCMYTCVLVYLCVCGNVCMYAVCMCACMCVHVCIGVHVYVCTCVCARVYVYTCVWVYLRVDMYACMHVCAYLCMCNCVCVHVCIHAYVCVCVHVCISAYVCSRVYASVSVLCGMYVSIVCVCMCACMHLYMCMCAHIWMHACCLHVHVSGVCACTCSRICMYAYMYARVCKFCRDCFPVERLKCAGSCALWGGWFFTYVLCGCAQVLCLWGAVLHVCVVWLCTGSVPVGGCSSHMCCVAMHRQTML

SEQ ID NO: 1987 - DNA, 29283 bp, Homo sapiens
  source (1)..(29283)
  CDS (201)..(219)
  CDS (7017)..(7163)
  CDS (14418)..(14563)
  CDS (18345)..(18441)
  CDS (21075)..(21210)
  CDS (23825)..(23913)
  CDS (25418)..(25481)
  CDS (28963)..(29083)
aatcaatgggatagaattcagagtccagaaattaacccatacatctatggtcagttgatttcaacaaagatgctaagaccattcaatggagaaagaatagtcttttcaacaaatagcacaggaataactggatatccacatgtacaagagtgaatgaaattggattcccacctcacaccatgcataaaaattaactcaaaatggatcggagagctaaatgtaagagctaaaattcttagaagaaataaaaatcttagaagaaaataaaggtgatattttagatcaagcaagtttttgtctcttttagttcagttccttcattggtggcttcttttgtgttaaatagatatattttgtagtgtaccattttaattcccttgtcatttcttccactatatattttgagttatcttcttagtgattgtgctgaggatgacaattaacaccttaatttataacaatctagttcagattaacaccaacttaattttagtagtacatgaaatgtcgcacctatatagctccatctctctcccccacccatgatgctattgtcacaaaatatgacaccaaaagcataaacaacaaaacaatagatagattagacttcatcaaaatttaaaacttttctgcatcaaaggtagaagtctagcctctctgtgtggtctccgttgacaccatggggaggaggacaccttgccactggctccctgcttagccttccctgatagtcccaacaggggagttgaggggctgacttagttcatttgggctgctgtaacaaaataccataaactgagtagcttataaaaacagaaatgtatttctcacagttctgaaagctgggaagtccaagatcaaggccccagcagattgggtgtctggtgagggcgcgccacctcagacggcacttcctctctctgtcctcacgtgatggaaggggcgagcagcctctcttgggcctcttttataagaacactaattccattcatgagggctccaccggcatgacctagtcacttcccaaaggcaccacctcctaataccattcccttaggggttaggacttcaacatataaacttagggggcagcgggcacaaacattcagatgtacagatgccttgttctctgtggtgtttagaatagtgaggttattgtctaaaagtgtttttcttgccaagcttcccatcagcttgtcctttggtagtgagaggaggcttttcttggggcttttgttttttttttaccctgctccacccctgttggtatttccagagtgctggcttcttcgcctacaagtttgggatgtatgaggcaaaaagaatacagaatacccaagaagctcaccaatatgccattcctggggtcccaacttttctagcttgtctgccttcttctctctgcattcagaattgtcttatgtttgtctttttttttttttgagacggagtttcactcttgtcacccaggctggagtacaatggtgcaatctcggctctctgcaacctctgcctcctgggttcaagtgattctcctgcctcggcctcctgagtagctgggattataggcgcccaccaccacgcccagataatttttgggttgtttattttttttggtagagatggagtttcaccgtgttggccagactggtctcgaactcctgacctcaggtgattcacccgccttggcctcccaaactgctgggattacaggcgtgagccaccgcgcccagccttttgtttgccttatatgtgatgaccagggttttagttgtacatagcaggaagaatagggaaaagtacatctactccatcttcccagaagcagatgttctataattgactttttaaatggaaagttataaaataattttttgtatgcaaggagcattaaaatattgaaactggctgggcgtggtggctcacgcctgtaatcccagcactttgggaggccgaagcggtcggatcatgaggtcaggagattgagaccatcctggataacacggtgaaacccacctctctactaaaaatacaaaataatagccgggcgaggtggcgggcgcctgtagtcccagctacttgggaggctgaggcaggagaatggcgtgaacccgggaggtggagtttgcagtgagccgagattgcgccactgcactccagcctgggcgacagagtgagactccatctcaaaaaaatattgaaactaagattcattatatttgtaaatacaatttgttagatgtataataattagttctgtggtaaggttttatttcaaaaaactaaatttgaataacatatttctttttacaaaataaaagcagattgccttttttgtccaccaaagccatggctctaagggggaagaaaaaacctcgctcatgtttatgagaagttgggctaataataaacatgtcccaaaatgctttccacaaagtgctgattctgttgagctttttagttgcaagtaacagaagcaagttcttaagcaaaattgggctgttcctggcttcaggaaggtctggaaccaggaggtctggaaccaggatggccccagggtcctgaggagcgacaactaatgatttgctcaggcctcaccttgggctgaagggagtcaacctttcttcagcctttgtgtttctcagtccaagatctggatcccagagaaagagattctgggctgcctggcttgggtcacacttgggccgtgatgtctagggaggatggagcactgggaatgacagttccaataagaccgtgtccaatggggagggggcggaggagagtcctccccagcaaaatcagggtgtcgtttatcagaagaaaaggaaaggattaaaatgttagtcaagtgagagtcatagatgtttactccagatgctgatggctggattccaggttaagagttctagagccaaatgagtttgagaacctgagttagacaaggagaaactcccctgagagcctctaacatgctctgggggcctcccagcagtgggtagaggatgcattgcctttaactacatggtgcttttcttgccttggcaccccattagcatctctgggaactcagctggggaaaccctggctgggcaggtctccagcgagccttttagctctgagatcctgtcatcccacaggaaggacgtgttctgcctgcaggtggctttattctgtcttgctgctcatcgggtgagtcagaatcagttcccagctctgaccttttccaggtgggggacacatctcaggtgtggtgaggttgtggcagagctgggactagactggggtcccctggctccacatctttcccttctgtggcagcgctgagccttgttgggagagaagttaaggacagctatccatagtgatttcagttggtgggcctccctctcggtcctcctgccctctcccgtccctggccaactgccccttctcagggaagacctgccctcagctctctaagccccgcgatctaggagagggcaggggggagggttgacttcactgttactgctgactgtgtcctgagggggaagcctcggccagctctggccactgcggggcagcttgctaattatctgtctttccagatggactgaacatatgacagtgaggactgtttgtcttgttaactgccgattccctagggcctgtcccccgccttaaagaatgggcaggatttcaccagggaggggaaccaggcggggttgggaagagaacatgctgggaaggaggttgcagcattggccagcatagagcattccttggtgttcagtggtggaatatggatggagggtgtgttggggacttgctatagtgtggtttaaatgctagtacactttgacccagcaattccacttacaagaatttgtcccaagggactaatccatacaaacgcacaaaaatgtgtgcactaggctattcaatcacagcattgtttttttaaaaggaaacataatagacacgggggactccaaaacggggaggggtgggggtgagagttgaaaaattaccgattgggtactgtgttcacttatttgggtgatgggttcactagaaacccaaacctcagcattacacaatttacccatgtaacacacctgcccatttaccccgactctaaaataaagttaaatgaaaaattaataataaaggaaacagcctaaatatccagtaatagcaaagcaatgatataaaatatggcacatccaaaaataatgagttatttgacatttaataaaaatgacaaattaggtatgcctgacagggaaatgtgctcacaatatgttaagtaaaaaaacagattataaaacagatggtaatcttatttttataaagtaaattaacatttccattgatatgtaaatttatggacagaaaaatgtttgcaggaataagaaccaaaatgtttatagtcattatctctgggttatagaattaaaagtgacttttctattatggtggtgttgttattgttatttttttcatttttttctcatgctaccttgtctaagatattattatttttatctatatatatttcctatttagtctacaatgaatatatgtttggtaatcattttagaaagtacaaaattccgtgccaggtagtctgaacctaactcataggtgatgtaaattaactttttataaattgagtaattgacaatgccctaagcaagtgagccagttaaaagagtttcattgaaaccctctgggaaattgaagacactattgacaagatagcaaaaagtattctctggcctatatttctcttgtaaattctgattttggaatgttgcttttctgcacaagatggtggcaagttaatactttaaagggaatagcacagcaggtttagaccttgtcaggtcagtgtgatcgggccaccaaagtatccaattcagggcagcattttgtaaaccagcaaagcagccagattaaccttcagtagtaacattccagttgtgggtctggagtgtggctttgtcactgatattgtttttctggttttgttttggggcagcaaatggttgagtgtcagaagtgtcctggggccccctggcttgtgcccaaatcatgtccactcctgtgaactttccttacaggaaaacctgattggcgccctcttggcgatcttcgggcacctcgtggtcagcattgcacttaacctccaggtaagtttcagttaccagcactgtctggggacagagacacagcagacaagtcagggtgtcttatccaggtccagctgcctcctctctgcagggccttgcctactgcatccctgggctgcacctgggacaataccttgtgggccgttccaggatttctcttgattcagtggccccactccatcccgccctcgccctcctagccaggtcctcactgtctctccttgggctttgcagtgacctcctgctagcttctctggctctggtctcatccctctttgccttgctgcaaagctgctggaattaccatagttttgtcaaattcaactctaattacagcactgttcattacttaaaagcctcagggatgccctctacagctgctgtggatccccccactgacctccaaatcccctcggcctgtctgagttcacaagcagctgtggtgtgtagcaagttgatagctaatgagcttctcatgggggcaccaaggagctggtgttactggcatgcaggcacagttggggtgtgcactgggggagcaggacgttaatgcccctggaggctgccttctgccagcaggggtgggaggcagggaataaatgccccaggctcttatcctctgctaggatgattctaaggtgagattcacagggtttttcagagggtcccctgtgggactgagtcccagttgcccacgggactaatccgctcatgaatgcacctttcatctctgttccctgcctcactttccccttcccttactcgtgctccctggaattatctcatacagactacctgctcccacattcttgtctcagggactgcttctgggaaacccagataagacttggtacctgctaacaggatgaatcccacagcacactggccggcttcactccaccagcactgcccagcttctgcctgcagtgaactgctctccctccctggagcaggcaggagactgtgatccctgtgggcacacacttgtgccttgttcacctgtactctatgcatctcagctctgggatgtgtatgtttctgtgtgtcgctgagaccacgtggtctcttagctacttgtctggttcattctcttctttctccagggcagcatctctggttgtttatctgcttctgggcagcccacatcatgatcctccccaaatggcagacttggccctctaagtcaacatgactttctagcctgctttagttactgcttcagtttcgatgtcccaggttcacatttccccccaaaaaagaatattgaccatgcttgagccacgtatccaccccagggagagcaaggcccactgatacccacacaactgcccagcgagagctgctggcatgtagacaggaaggagtgtgccgaacacacagtcatccaaacgtggggaatcctggaaactgcagagagagggaggaggtcgacccaagggccaggccaagtgggatctttagactatggctcccaccctgagactgcattgcctgtgacgtgcattagaaatgcctgttttcaggctcatccacacctctccgagactgactcaggatgaggcccaggtgggtattttgacagagcttctcaggggattataaggattcccagcctgttggagagctactgtcctagaatttagatctagtatttagatccccactgtcttactcttctctgagtcaggactccacaagaacctgacaagtcttcccaatttatttgcaagttgggggtggatttagggtacctacatcatagcatttttttccccaaacatctgagcaaattgcattatttctcgggtttctagaagtactgccacatccgcctggcaggctccaaggatccccgggcctatttcaagaccaagacatggtggctgggcctgttcctgatgcttctgggcgagctgggtgtgttcgcctcctacgccttcgcgccgctgtcactcatcgtgcccctcagcgcagtttctgtgataggtaagaccagggctgccccaccctcccctggggtgctcccagctgcgtgaccagagtgccagcgccaggatcaaaggtgcccattgaacaaaccagctttagcttggataataatagcctaatacaaagggcttcagacacaccaggccctgtaagtgcttacagatattaattctgctaatcctccagccacctgttgagggagatgttgttgttatccccatttaacagatgaggaaactgaggcacggggtaatgaaattactttccccaaatgacacagctagtgagtaacagggctgggatatgaactgggctgtctggctccaggttctgtttaagattcagaaggcttattagaattgctttttatttctaaaagaagaaggaagataaaccttaacccatgcatcttttcaccatcaagatacattaagcttgtcactgagtgcagtggcttgtacctgtaatcccagctacttgggaggctgaagtgggaggatcgcttgaggccaggagtttgagaccagcctgggcaacatggagagaccccatctctacaaaatgaaacaaacaaacaaaaaagaaaaacaattagctgggcatggtggtatgcatctgtggtcctagctacttgggaaacagaagcaggaggatcccttaagtccagtgtttgagtgctgcagtgagctttgattacacaattgcactccagcctgggtgacagagcaagacctcatctattgaaaaaacaaattaagcttttgtagggtttggggccaggccaggctggtctcaaattcttgagctcaaactatctgcctgcctttcctcccaaagtgctgggactacaattgtaagccaccacactggccattaactttctcatctgccagctttctgtgatttctgtaatcactgaaccagtgtttcagaacatttgaaccaactaaaagacaagggagctttaatgttcatgagaacacaagcaaaacagaattagaaaaaaaaaattcttcttaaagaaaagatgttagtagattagtgaacaatagctttttttgtgtgcatagcagccaggacaatgaacttgctttgaaatatttctttccattttgctggcaagcactactctgcccagatgctctgctctgctcttaaaggagaaagtcatattttgggtcttattcctccttgagttaagaggttctcttctatgcaagggatggcagatgcatggtaactatgtgcccctcccttgctgtgctcaaggcagacatcgttaatcaatcatggcattccttcctagagagcatagatggggcctcagaattctcagtgcttccaacagtcactaccaatcaccaggagttggcaagggagcagaaacctatttactttccctgatcctgttataagtcccggtttttcctaaccagggttgctgaactggcagcttgcaaagtgaatgaggtcctcagacatggtgtgtgttttttcccacacagtacttttttaatgtaatttgaatgtctttagctgaggcaagtagtttgccagagtctcagcctttccctgttgtcttacttccagaccattttctatatttgtgttctgttactccccagcccctgtatgtgatcatacctgtagccttatcactctgctctgcccactgcaggtatctccaaagggctcccaaacctttttcacaatgagaaataagtgtctaagtgactggtgctttaaatattagtcttcgaattttaataaggttcaaataaccaaattcttttttttttttaaagaggccaagttataatgataaaacttcagatatcagccactggaaatgaaggggccctatagcttctgaggtcatccagtgaggagtaatattaaaaataataatgattatcacttattggatatctatgacttaaccatcactgctccaggtacttttagtaataatattagcttagttattgagattgactgtgtgccaaatgacttacatatatcattgaattacccctatcattcagaaaagtaattttcaatggtgggctggtaaaccacctctcagagagacaaaggagaagaaaaagaagaggagatggagggatggagaaaggggatggaaaagtggaaaggagaaaaggaagacctgatttgtagcgcttgccagtttatatggtatagacattatcactcccactgtggctgatttcaagctacggatggttttctgaatatttaacaaaatatttaacattctatgagctggtgccagctggatctaacaccgtatttcatagactagagaactgagactcaggtgaagtgacatatccaaggacacacagccagaagaggcagaactagggtagtgagtgatccaggtctgttcacagtgactgccagccctatcctttcgggcagtcccaagggcgtttgagtacatctgtgaacgtgtaagagccagggagaggaaagagccgggggaaatgtcagaggtgggtgttacagtggaagaagtaagagcctggcctcctgcagtcctgggttcaagtcttgccttcccctaccaccttcatgatctcgagtgggccctttacctctctcagcttcagtgtccccatttgtcaaataggaataatgagagtacccacctccaagggtgaacatgccagaaataacttgtgtaaattgcctgtcacacagcaggtactcaatgcttctagccttgtaggaaatcctcaggaaggaaggctcctctctgagcctccctttcctagatggaatcacacaggaaccaagcttttggcagcatgagtgacaggttaggaagtaccaagctccaatgcaaagaagccacccagagggcatgggtgaagggatgccctttagctgacagcagcctcaattcccttttctttgtgcttcatttttcagctagtgccatcataggaatcatattcatcaaggaaaagtggaaaccgaaagactttctgagtaagttcagtgatttgagctgtgtccttgattttatatgaacgctttttattaattgtaaaaccagttcactctaattcagaggttatctgcctcctgctgtcctctgtggttctatgttctgccctcaacaggctcctgagagctggattttttaatcaggggttctcaagcctggccacacctcagaatcatcggtgaggcttttaaaaatggacttttatccaccccattggatcaattttgagcatctattattgggattttaggaggcctaagaaaagaaaccctctctccctgactgagttctaaagcaatgggagtcaaacacagatgatcagaagtcatgccttactcctaataaaagctagattagagcattttaggtgagctagattaaagcataaagctgcttaggtgagcagccaagggaatgtccttgtactctccccacaggaccctccagctcccagtcagaccttgggcgggtccccccaagaaacacttgggtttacagagtggagacacttagccagaattattgcctcacatagtttgggccagagaaggaagaaaaaagatcaaagccccagtatttaatttttttatttttttaagaagattagctccacctaagttgagaaatgtagaccaatagggcaagaggcagaagtgtcactttaatggaggtccctccacatggaaacccaagaagtggggaagaagcgtttcccacaaaacacctactaagtcccatgttgtgttataggtgctgggaatacagcagtaggatagatggggcttctgctcacagagattatagtcgtgtgtgtgtgtgtgtgtgtgtgtgtgtgtgtgtgtgttgtgggaggggagagatacaataaacaagcaactaaatgaaataattttaggttgtagtgagtttttcagagaaaattgaatgctttcggggactggggagatgggaacactttcctagactgatcagggtcagactctctgaggaggtgatttttccccccaacttttaatttaatttcaggggtacatgtgcaggatgtgcaggtttgttacatagggcaacatgtgccatggtggtttgctgcacagatcatcccatcacctaggtattaagcccagcatccattagctattcttcccaatggtctccctcccccaaacccccaccctccaacaagccccagtgtgtgttgttcccccaccatgtgtccatgtgttctcatcattcagctcccacttaaagtgaggacatgcagtatttggttttctgttcctgcattagtttgctgagaataatggcttctacctccatccatgtccctgcaaaggatatgatatcattttttttggctgcatagtattccatggtgtatacgtaccacattttctttatccctctgtcattgataggcatttaggttgattctatgtctttgctatcgtgaatgtgctgcagtgaacatatgtgcacatgtatctttataatagaacaatttatgttcctttgggtatatacccagttaatgggattgctgggtcaaatggtatttctacctctaggactttgaggaatcaccacactgtcttccacaatcgttgaactaatttacacaaggaggtgatttttaagcccagatccaggtgatactaaggagattgccatccccaggtctgtgggccgggttttccacataccaggagccacaggtgcaaaggatccaaggcaggaacaagcttggtttgtccaagtctcggtaaggctgtgtagccagagggtaatgaataaagtgagagggagatcagtgagacatggaggactggctgatgtgtaggccttatgtgccatactgaggagttgaggagtgacgtgatggtggcccaagctctgtcctcagagattctgcgctctgggctggggccggggccggggcattggcattcttatagagcttcccagggtgaagtgtatactgatgcctgcaaatcactttgaaatgcatcaaaaataagatgaattaatgcatggatagagagatggatagatttgtgagaaaacaagtataatgaaaggtcagtttagaatctggctgttgggactatgggtactcactatacaactttttgaactttaatatatgtctgaaaaattttaaaacagaacttcagggagagaaaatttccaagatgttgtggatatacagccaagtttggggaccactctgaatcattgatatagaataagatcaaggtgggaccaagaggccaaaaaagaaaagaattttactctaaaaaaaaaagcagaactttgccaaaagaaaaaagtagagactttggagctactgccaagaagaccaaatgacagactgaatttcaatagtcttaatgatggggcacgggggttagggctggttctaagaccactatagaagtttgcatccctttgggaatactctaggtaatcctaggatgagagccgtgctagtccaagcagtgccctgtgtgacttggaaaaagaaggcccctctgggcatctgtagttttgtaggcacaagccttgatgagcagaccatgggctggattttagcccatctcacctattgagccaggtgcccttgtgcagtgagcaacctgcacagctgaatatggctgttttacctggagttccattacattcagcaaacattcactcagtgctagacctgtgttggacgctgcaggtgtggagatgagtaagacccatccctgcctgaagaaaactttagataacagacctactttattgagtttaaccgtggctcattcattcattgaacaattgaacaaccgttttttgagcacctcctacatttacgaggcctagtactgagaataaagataaaagacatttaacatggtatcacattttctctagacagtgggatgaaataggcaaagttagttctatcccagaaaagtccagaggcctgtggtcaccataagtgtgtcttagaactctcagccattttttggctgcctggggctgggccggaccttggaggcttttcaccaaccttacagagttcaataggagtgtgacaagactccaggggagagataagagccatgccacctggaccactaacagttctctgacaggtctgtggcgtagaatattgatagtaattatatagttattatatagttcccttggcgttaggttaaatagccagttgagaaaggatgaggtaatttttaaaaggtacgtgttgagctctgaaggtttgcctttatgttttattttatttgtttttttagtttgcccataaagtgattttagctttaaaatgttacctgtaaaatgcacattaaaatcacagtgcaataccatcatggctaaaatgaaaaagacaaaatgtaagtgttgacaagaatgtaactagaactgtcttactctactggtgggagtgtaaattggtacagccactggggaaaaacatttgacactaactaccaaactgaacatccacatatcctatggaggaattccacctctcattttatactcaacagaaatgcatacatgtgtttctcaaatgacatgtacgagaatgttcacagcaacattattttttataactccaggctggagactcctcaaaagccccccagcagtagaatggataaattgtgttgtattcacacagtggaccactgtacacagtgagaacgaatgaactgccactgtgccccacaacgcagacgaatctcagaaacatcatgctgagtcaaaagagatcacaccgtatgggtccatttgtataaagcacaaagctaggcaaagccatcagtgctgttacaggtcaagatagtgtaaccctgagggtggggtctagtaatcaatttcacaaatgagaaatttcagtatctggctaatgttctctttctccatctgggagctggtttcatgagtgtgttcactttgggagaattcctcaagcactttttgtatgcatgttatacttcattaaagttttttatttttttacattaattgtttttttaacaaaattaaggaaaatcatttattttttaaagtaaagaaaaaccaaaaatacaaacaataccaggtcatggtatgttgcaggagaagcctgttttttcatggctgagaacgtgtactgtatcttgggcctgttgttgcaatgagtccgtgacagcctctcttccccgcagggcgctacgtcttgtcctttgttggctgcggtttggctgtcgtgggtacctacctgctggtgacattcgcacccaacagtcacgagaagatgacaggcgagaatgtcaccaggcacctcgtgagctggcctttccttttgtacatggtaagagaagcctccagtcgttccccctgagatggcaggagggagatcaagtcctagaaaccagaaacgtgaatacccagcaataggggattccgtgagttgcggcacattttaccagcatgaaagaccgtgcttctggagagtacacagctcatggcgaaatgcttgtttcatttatgtaatatcaaaactctactggtgggagtgtaaattggtacagccacttgggaaaaacatttgacactaattaccaaattgaatatccacatatcctatggaggaattccacccctcattttatactcaacagaaatgcatacatgtgtttctcaaatgacatgtatgagaatgttcacagcaacattattttttataactccaggctggagactcctcaagtgccccccagcagtagaatggataaattgtgttgtattcacacagtggatcactgtacacaatgagaacgaatgaactgccactgtgccccacacagtaatatcaaaaccattatgatgtcagttttattttttagaggtgtgtataggtatgtggtcatgtaatatacctaggaaggcctggatgggaaagcaaattccatcagtagttggctctgggagatagtgttatgactcagttcttatttcctcttcatctttatgaattgtccaaaatttctacagtaaccatttcaaacttttatggtaaggggaagaaaaagttaaaactgtaaaccatttaagaatgttattttattttttttcccagtatcacactgctgatagaagcccaggagacacgggaaattttgtctcctaacccctccgccagagctcagtcctctgccccagttctatcccattttaagtctataaatcaactgattaaggaaaacatctaaagtatgtgataaagctactggtacgttcttgttccatgccctgcgctgtgctaaacacatttttatgtatcatctcagattctcttaaccctgtaaagtaaatgttcttcccattttatgggtgagaaaaccagggctctgagaggttagctgacctgctcagagttcataaaagcagggttggatttgaaggccgggcccacctggcctcaggtgccatcttccttccccgtggcctgccgacaaaggtgttcactgttttcctctgacataaacagcctggtctctgattgagtctagaggccctggaacatcctttttcctcagattatccacaaggcagaggatcacttcccctgaaatgggggctgtgtcatttcccaacaggcagccagccccagcatgtagttggtgacagagcaaaagaccgcctccttgggcaaagcgttaccccagaacaggcctttcactcagaggattgaagcccaagacttcctaagtgctgtgtggccttagccaagtcgctttccttctctgtttccctctctgtaaagtggcaagaatctctggacttaaaattgctattgggagatccaggaagtagcatttaagtcacccagaaggtggtagatgctcagtgaatgattctgttgtcttacttcatcatgactgggaggcagtgctgccagctggagagatttggccaaaccaaattcagtcaatatttattgagcgtctgctgtgtgctagacactatggttataaaaaataaatgagacatgcccacagtactcacggactgttgggaggcaccacatatgcacagccatctcatgatataatgtccagtgctattccagtgttcattttagaatcatggagaacgggccacatgtggtggctcacacctataatctcagcactttgggaggccgaggtaggaggattgcttgagcccaggaacttgagaccagtgtgggcaatgtggcaaaaccccgtctctatttggaaaaaaaaaagtaaaaattagccaggtgtggtgatgcatgcctgtattaccagctactaaggaggctaaggtgggaggatagctttgagccctggaggtcaaagctgcagtaagccatgatcacagtactgcactccagcctgagtgacacagtgagaccctgtctcaaaaaaagaaaaagaaaaaaaaaatcatggagaatggctgaagaattgggacccctcaaatgcaggcacagtggttgggaatgttgatgattgacagcacatccacttgatgaagtattctgcagcaattaaagataattatgacaacttcacaaaacatgaagattgtttatggtaactaaaaacagcccagtacaaaatcgtgcattgactataatgacaactcgttaaaatatggattcactggaacaaagacaaagaagaaacggggaaatgaaagcagctgtgttttatggtctctaattagaaggaatgttttaaatgtttcaaaatgcccattaatgtttctgggttttttttatactaaatcagctttgataaggggtttgggataggcaaatgagactaagctgttgtcaaagttttctgctttagttgcactgggcgctagggctggcttaacttcttgggaaagtgttagcaaatatctgggcttttaaggggtagaaaggaacagttgttgatgcaaggagggggagcttctcaaactcggacttgccatcgtctagtggtaagtttctactgatagagcaccagacagtgtggcctagcaggaaagtgcatgggcctgggagccagactgtccaggtttaaattcctctgtgccacgccatcgtggtagtacctgcttcgtagagttattgtgctgatttagtgagtttaacgtagataaaatgcttagaacactgcctggcgtacaaggagacgtcatttagtgtaagctatgattatgggcccataaaaagaattcttaaccctactccacagagggttaactaaggtttagagaagttaagtgacttacccaaggccacacgactagtttagaggcagacctaagttccagcccaggtctccctgactccaaaggccttcctcattctactctgtgaagcttcacactggaagcttggctgggagcacagggagtatatactcatattctttatttatgtatttatttatttttttgagatggagcctcgctctgtctcccaggatggagtgcagtggcgtgatctcagcaattctcctgcctcagcctcctgagtagctgggattataggcagatgccaccacgcccagctaattttttttttttttttttttgtatttttagtagagaccgggtttcaccatgttggccaggctggtctcgaactcctgacttcaggtgatccacccgccttggcctcccaaagtgctagggttacaggtgtgagccaccgtgcctggcctcacattcttgaccaaataggttggtgaacaagtgtctccctcttggaccaacccattgttttaatggggatgcccatggagcagtggagtgggaagaaaccatctcagcctgatgcatcttggccctccaagaaagagtggatatgagagcagcacgtcaccctcaaagcttcagcctcaggacaacagggaattccttctcagtactagccagggattagagagattcactctgtgtttcccttttcccctgaacgtctaacagtagtttgggaaatgctgaatcatagctcagtcattccctttcaaccctgtgactctggtgatggcccagcccaccagggtctcccggtctcgcctacttctgtggtccccactgacccccctgcttgctgccttccacagctggtggagatcattctgttctgcttgctgctctacttctacaaggagaagaacgccaacaacattgtcgtgattcttctcttggtggcgttacttggtaagttggcatctggatgattgagttttgccaccaccaagaagcaccaaatggaaatgtgggttttgtttgcagagctgtagccgctgggcacagaagttgcttgagactggctgaggttgttctgtctccatcagtggctctggggagctgggtccctgctgaccggaggcaaactcctgtgctccaggagcctccaatctaaagggagaaaatagcactaaacaactagccaaattcataggtcatgtaagtttgggcaataacaattccaatgaggaagaataaagtagagtgaggatgaggtgagttagtttgtttcagagacggtagtagtagagcatgccccagcgattgagccctgaaaagatccatgcaaaacctatcagagcttagggattcattctgattcaaaggtaaaactagattttgtcatctattttttcttttccttttagagggatgggtgctgtggaagagatagctcctgaatcagcttgaggctagaactgcatattaatttttcctttttttttttttttgagacagtcttgctctgtcacccaggctggagtgcagtggtacaatcttagctctctgcagccttgacctcctggcctcaagtgatccccctgcctcggcctcccaaagtgccaggattacaggcatgaggccctgtacctggctagaactgcatataattttatagctaaatagagctgtggggaatccatccttcctgaggagaagcagacagaggcggaggagcaggctggtgtcagggctggtgaagcctgctaccgcgctgctcttgagtggcctcaggctaatgaccctccctccttaagccacgctgtccacttctctaaagggggggcctatgagaacatccaagtcacggaagggagtgggggttaaatgagatgtgcacaggtggctaatatgtgcatttttcttccaaccttcctactgtgtgccctaccaccgccacaagccatcaaccaaatagatacctgtcaccgaagacagggtttccttaattttttaacagctctgttgagatataatttacataccataaagttcacctgtttaaagtatacaattcagtggtttttagtatttcatagagttgtgaaaccatcatcctaatctaattttagaacattttgtcacccccaaaagaaaccctgtgcccattagcagtcactccctgttccccttttcccagcctcaggcaaccactaagctatcttctgtccctgtagatttgcctttttgaacaccttcataaataaagtcgtatgctttgtggcctgatatgactggcttctttcactgagcatgatgattctgaggttcacccacatcatagcatgaatcagtccttcattcctcggtgactttgttttcaaagtggatgggaaggatcacggccctgaaacatcctctcctcttacgtaggaaggccagaaggttctgaggccattggccaatccccttctgactaagaaggactacctgatgacaagtgcctaagtggttgctgacgtttggaaacagtagcctaatgggtgaggagcccaagagacactgcgtgttgggggtgttggcaggagaaagcgaaataaaccaaagctgaagaataggaaagcaaagcacagcagcagggaccgggggcttcacctggaccacgcttgggggctgtctctaactcctgtttggcagggcagtctgaaagtctgcagttagaagacatttctgaacagtagggtggagcaagggtctccacagggaggtgagcaggatgcttcgctgggtacacagagagaatattagaacttcaatcattttttctctgccttttaaattatattcctgtacaaattttataacatgcctaccatttaagttcagggtcacatgactttaatttgaaaacagatacacacatattggaaatgtttgcacatatgcacaggggtgtgcattccaaaacactggagaaatgtttttaaaaatacaagtgaccagctgggcgcggaggctcacgcctgtaatcccagctattagggaggcagagatgggagggtagcttgagcccaagaattcaagacctgcctgggcaatatagcgagaccctgttgtccacaaaaaggaaaaaaaaaaatacaacaacaacaaaaaatacaagtgactgagcactaaaaaacccaacaattcctaagctgtttacccaacacatgtttttcctgtggttgccatgagactggtaagttcgttgatccactcggatccttttggccacagtgctgggcactccgggcctcagagaactgaacttactgcccatgcttggcagtttagaagtgatgtctaggattaccttcagggggttggctttcctccctcctttaggatgtagtcagcacagagcatgggagtccatgggagaggtgcacacgagacccagtgcaaacggcgtctgtcactgtgcaaactgccggcttgactctgttcctgttccctcccctctgtctccccaagtcctttggggttatagactggctttccggacctaactctctgcatttccctgaggctccccattcgcccttgtctcccatctgcaggctccatgacagtggtgacagtcaaggccgtggctgggatgcttgtcttgtccattcaagggaacctgcagcttgactaccccatcttctacgtgatgttcgtgtgcatggtggcaaccgccgtctatcaggctgcgtgagttacaaatccttttcctgctgggccctgccattcgggctgcttctcttttgggggcctgatgacgtatgctgtgaagccacaaggaggccagaacatgccccagggcctggcatccagcatggagagaggagctgctaatttgctgagttgtcacctggagggacacctgccactcaaaagacgaagccaggccaggctcagtgacccacgcctgtaatcccagctctttgggaggctgaggtgggtgggtcacttgaggccaggggtttgagactagcctggccaacatggtgaaaccccgtctttactaaaaatacaaaaaaataaaataaaattagctgggcatggtggcacatgcctgtagtcccagctactcaggaagctgagacacagaattaaaaaagaaaaaagaaagaaatacgaagccagcagtggatggatttttccccactccctcagaatgtgataatttttgtttgtttgcttgtttgtttgttttttgagatagagtctcactctgttgcctaggctggagtgcagtagagccatctcggctcactgtaacctctgcctctggggttcaagcgattctcctgcctcagcctcccaagtagctgggactacaggtgtatgccaccacacccggctaatttttgtatttttagtagagacgagatttcactttgtgggccaggctggtctcaaactcctaacctcaagtgatccacccaccttggcctccaaagtactgggattacaggcatgagccacaacacctggccagaatgtgagaaatttgtggttggaggcagccttacttcccatcttctccggggcagatgatcgtctcaggggcctcggaagcatggccatccctaggaggcacctgcttgtctgctgggttggaaagaaaagttgtcatttcttgacttcagtatatcacctccaaatcttcctgagtggaaggcaaagtgccccctcctctttctaagcatgaagttaaataaaaggcagcagcctgagggcagggcctgtgtcttgtttgcgtttgagtcctggagcccaacagagggcctgggaggagaggctctaggaatcttgtaggtgacaaaacctgtgtaggtacacaggactcagcagcgcacaaggctgattcaacctgggaagctcaggctcagactgaaggtccaccagctacatggcctccaggcaccataggagcagctgctgctggcccggtgtgagcccagctcttttctcagtgctttatggaaccagctcatttggtccttacaacactcctttgatgtacaggatattatccccattttgcatacgaggaactgatgcggagagagtaagaggctagaaagtggcggagctgagatctgaacccaggtgtctggctccccagcccatgccctcactgctctgctcttctgtcgcctactcagcttctccaagacagattcttcacctgctaatgagaacaacagtccctacctaagagaatcacatgaagctcttatgagaatgtctctagggaaatgcccggtaaacatgagctgcttctatgattattggccttgctattgttattttggttattatttttggtcccactacaacaattccagtcatcacctggaagcccctgccagtcaaaggccctgtgctgagcactccaggtgtcacaaacatggctcagatgccaccgcccacctcctaaggagctactcattccctagccagtgcagcccactgagggtgctcagcacacagagatgatgagggtagtcactcactgccctcaggcattcacggccctggctgggggacagccagtgaagaaactagtacagccaagctgcatgcagtggctcacacctgtaatcccagctactcaggaggctgaggcaggagcatttgagccccgtagttagaggctgtggtgagctgtcattttgccactgcactccagcctaggccacaaagcgaagtaaaaaaataaaagcaattgagtggtgagcatggtgtaagcaactatgcagagaaagggcaaagaatatcttccaaaacaagggtattgtttatcatagatggagtgattaggaaggactctaattttctctttttcctgtatttatttcagtgatcacattattttcaaattaaaaagaaattttgtttaaaagaataattatgacactaggcagaacgtgattagtgctgtaagagtttctgggggcaggggtataagagatgcaggaatggctctttttagtggggtggggatacggggggtgaggagaagggcatttcaggtgacaggagccgtgcagccaaaggtgtgagaccatgatggcatggttcaattgggaaatggggatgggccttagctgtgtgtctaggggaagagtgggaatcaagtatgggccccagactagggatacacaatgtcctgtaacatgagggtggcatttttagaaacccaaggaacattcctaaatgtatcatcttcatatttcaaaccaaactctactgttgtcagctcttagcctttccaacgtctccacagcccactgactggagtgcttttgtgttgaaggtttttgagtcaagcctcacagatgtacgactcctctttgattgccagtgtgggctacattctgtccacaaccattgctatcacagcaggtaagggtgacccattgctagatttctgtcttctactttagcagcagggtattatcccagggcagagggaggctgattctgctgacttgttctccccgtagagtgatttatgggttcatggagaatgtgcaggatttccagacagagagacccgggtttgtatcccagcacagacgcacatcagctctgcaaacatcacttaacctctctgagcctcagctccacattcataaaatgggagtgataacacttagctcctagaattgtaatgggtatgatccaaatgtgccctatgccatactgtgtgtactttaacaagttttgctatcttctagctccacaacccccactggctaagtgaccacaaatctcttctgtataattttagagattatgaatatgcatagcactgcaacatcatcaatgctcaataagtgatcattagcattacagcccccttttcctctatttcacctctaatttttttttgcattttctttctgtagtggcctcagaggctgcaatcatataaagctgtttgttaatttgtttaaatggcataataggtgactaaaatcttcagagtaaaaaatccaataagaactaagtgctttcctttggtgaaagcctggctgtaaagccctatgctctgccaacacttaagacaagtggtgccgcagttcctgtctacacaggaggaacacacgaggcgcacagcttccagggcccatgctgtgagcagcaccaggggccatgaggcattgacccagagcagccagaagccataagctaagtcagggtcaagaagcttggtcaagaagcgtgaagtccagtcaaggttgaaaggaatcacaaacaccatggttgagtgagaacagaagtcaaggcagggaatcaggagctcaggaatacagctggaggcctgtgtgggtgagatgattctggacaaaggctggctcagggcaggcgcagtaggcccaccccactcccataccacaggagtagacccacagacttgggatctactggccacatgaggttagaaagctctaacagcataagcacaaagccttgtttatctatcttaagaaagatggaggggagatgactgcaggcacaaactggtaaatagggtctgtggtttggttagtaagtgttcattgtcgttttcctgctttgattatgcactgtggttatggaagatatgactggggaaagctggaggaagggtgcatgggaactctacaccatttttgtgagtctaatattatcccccaataaaagttaaaaaacaacatggagatcagaggggtctaaggtggaaaaaagttgacaacctgatcccctaaatggcttttattcctttcttcttgtaaggcacagtcataagttttgatcattttagtttcctaaatggaagagagcttagccaaatcctagacagactggcagatgggtgatttgaaaacagctcagcggtattttctatgatttgctgctgcaggtgcaatattttacctggacttcatcggggaggacgtgctgcacatctgcatgtttgcactggggtgagttctgtcctgcttgccagccccaaaacattgtgtgtagaattccaagcaggttgcccctctctctcccttattgctacagccgccccatcctttagagtcagaggagctgtggggttttggagctttgtccccagaggtgagcgttttattcctctaagggctttatcttccccttctcttttggactctaatctctttggcatttctcaaatatcacattttgacacatgaaaagtctctcaacctcacctcggatctaagaaatgcatattgaagctacatgagataccatcattttgcaaaaactaacaggattaatagtattccacattggcaagaagatgaggaggcccgcctactaccacactgttagcatacttgaatgtgggaggaaaatttaacaacagcaacaaaaaatccaaacaagcatactttttgatacagtattccattctaatcatttatcttggaaaaatgcttcaacagggatgcaaatacacatgtatgaggctatttattaatttttaaattagttgtataagcaaacaattgaaaacaatagaaatgctcagcagtagaatacaagtgttaaaaaattatgccatatccagataatagcatgccatgctgccattttgaaaacttgaggccagtctgtaggtgctgacacagatccatgtctagaacacattcatcaaaaaaaatcacaggctgggagaggtggctcacacctgtaatcccagcactttggaaggccgaggcaggtggattacctgaggtcgggagtttgagaccagcctgaccaacatggagaaaccccgtctgtactaaaaatacaaaaattagttgggcatgatggtgcatgcctgtaatcccagctactcgggaggctgaggcaggagaatcacttgaacccgggaggcggaggttgtggtgacccgagattgcgccattgcagtccagcctgggcaacaagagcaaaattccgtctcaaaaaaaaaaaaaaaatcacaaacttttaaaaatttggccttggccgggtgcagtggctcgtgcctataattccagcactttgggaggctgaggcaggtggatcacctgaggtcaggagtttgagtctagcctggccaacgtgctgaaaccccgtctgtactaaaaatacaaaaaaattagccaggcatggtggcaggcacctgtaatcccagctactcgggaggctgaggcaggagaatcacttgaacctgggaggtggaggttgcagtgagctgagatcatgccattgcatgcctggacaatgagagcataagtctgtctcaaaaaaaaaaaaaagtggccttaccctataatccagcaatttcacctctagattctttacccaaaagaaagagtacatctgtattagtccattctcatgttgctaataaagacatacctgagactgggtaatttataaaggaaagagatttaattgactcacagttcagcatggctggggaggcctcaggaaacttacagtcattgcagaaggggaagcaaacacgtccttcttcacatggcagcaggaaggagagaagtgccaagcaaagggggaaaagccccttataaagccatcagatctcgtgagaactcactcactatcatgagaacagcatgggggtaactgctcccatgattcagttacctcccagcaggtccctcccatgacacatggggattgtgggaactacaattcaagatgagatttgggtggggaaacagccaaaccatatcagcatctgttgacaaaatgactcgcacatgagtatttatatagtagctttattcatcataggtctaaattggaaacaacccaaatgtctaccaacaggagagtaggaaaaacatagtatattcagacaatgggttctacgcaacaattaaaataatgagctataagccaggtacagtggctcacgcctgtaatcccagcactttagcaggccaaggcgggaggatcacttgaggtcaggagttcgagaccagcctgaccacagtggcaaaaccctgtctctactaaaaatacaaaaattagccaggcgtggtggcttgcacctgtaatcccagctactcgggaggctgaggcagtataatggattgaacccgagcggcagaggttgcagtgagccaagatcacagcactgcactccagcctgggcgacagagcaagactcagtctcgaaaaaaaataatgaactactaatacatacaataaagaagatgaatcttgaccaagcatggtggctcatgcttgtaatcccagcactttgggaggctgaggcgggtggatcacctgagatcaggagttcgagaccagcctggtggtttgccaacatggcaaaaccccatctctactaaaaatacaaaattacaaaatacaaaaatactaaaaatactaaaatacaaaatactaaaaatacaaaatacaaaattttgtactaaaaatacaaaaattagcctggcatgctggcacgtgcctgtaatcccaggtactggggggctgaggcaggaggatcgcttgaacctgggaggtggaggttgcagtgagccgagatcctgccacttgactccagcctgggcaacagagcgagactccatctcaaaaaaaaatcaaaaaaataaaaaaggaagatgaatcttaacattttatcaaatgaaagaaaccagacataaaagagtacatattgtatgatttaacttacatgaattaaagaacagactaatttcatccatggtgagagaagtcaagatagtagttacctctggggaagggctggcatgaaatggaaaggggcccaggaaaactttctgagggggatggacgtattttctgtcttgaactggttgatgattccccaagtaaaattcattcagctagacatctagggtttgtgcattttgctgcttataaattataccttaatgtttagaaagtatgcttgtttatgtaagctataggaaaaagggaaaaaacaaaacaaaaaataacctggaaggctatacacctacctggccgagtgagaccaggagtacagggactctccaatttttattgatttttactatctatacttcagtaatgattgaaatgaatgacttcaatttaagaaaatgttttaaaaggcaagcttccgagaatcctgattgaatggaagtgaagagccatgagaagctcgcccaggagagtctaatttattctgattacagctcatggagagtgtagggcatgtgaggccactccagctattgttattcaacttgcatctgcccctgctgatcccctgagaggctggcagcctctcagggctccttgggcggtgagccctcctccgcagcctgcaagcctttttacctctttccatcacctgagcctgaaagtgtgcctgcccgaccttgctcctggccttatttctcttcctatcttatctccattccgcaggtgcctcattgcattcttgggcgtcttcttaatcacgcgtaacaggaagaagcccattccatttgagccctatatttccatggatgccatgccaggtaaggttaaagccccgtgggtctagctgaacatccatatagaatgactgctacttcctgtttaaaaagagacaaccaactgctgtgctgtgcctttatcgtgtgactgttctctcactgtcttttttcttttctttttaattttgtgcaaaagggtaggcaatggctgaggcacctcggttggttttgagcacatcttgccagttctgtgtctatttggggatct

SEQ ID NO: 1988 - protein, 272 aa, Homo sapiens
MDRRAKCSKDPRAYFKTKTWWLGLFLMLLGELGVFASYAFAPLSLIVPLSAVSVIGRYVLSFVGCGLAVVGTYLLVTFAPNSHEKMTGENVTRHLVSWPFLLYMLVEIILFCLLLYFYKEKNANNIVVILLLVALLGSMTVVTVKAVAGMLVLSIQGNLQLDYPIFYVMFVCMVATAVYQAAFLSQASQMYDSSLIASVGYILSTTIAITAGAIFYLDFIGEDVLHICMFALGCLIAFLGVFLITRNRKKPIPFEPYISMDAMPGKVKAPWV

SEQ ID NO: 1989 - DNA, 14241 bp, Homo sapiens
  source (1)..(14241)
  CDS (201)..(267)
  CDS (4723)..(4988)
  CDS (5026)..(5670)
  CDS (13871)..(14041)
acgttctcaagggtcatccatgatgtagccagaatcatggctgagaaggagccgtgtatttgtgtgcacatgtctgtctcaccctatggtgcctgaggctctcccagggctgcttgagaactgagtccttgtgtttttcaggtttggggtgatccacttggtgttcaccaacctgcttctgtgggccaacggcgtcctcaatgagtcaaagcaccaatgagcacaaggaatggctcatcactctgggctttgggaacataacaacaggtgagtgctgagagaggtgagtggcccctctgccatgttggaatgtcttggaaacctgcagagtccacagtgttcagagatggagtgcaggttccaaagaacttcaggcccaccaaagtcagcatcagccagacagccccctgttgttgaaaatcttccaaaacctgaatctctcataagtgatgtgtactgagcataattaaaggtttcttccatgactcagggacttgtaagacccacggtgatcattctgatggccatttctcatggtccagtttgccgcagaaataaatgtctttgttttcaactacagaagattgatggttgcctctgcttgtgtttttaattaaacctctactaccagttctttctagtaaaagtatggcttttaaaaattcataaaagtctaatggtaggttgtggttaataggctgtggttcatttaaagttttaatttaactgtagttggcttataattctagctcatgtctgttctaccttgttcctatttgagagcctgttgggttaatctttatattttcatctaaaatcctttagcatttacaatatgtcacttctatatgagaacattcaggctgaggggaatgtggggcagggaactgggtgtctcaggtttgttcccatcatgtacaagctgtgtgatctttagaagacatttaatctctctgagcctcccttttctcatttgtaaagtgagggtatccaaatcacgcacttgcaaagatcccttccagctttaacatgcagcaagtctgtgacagctgtgtgaacccaagctgtcctggagagccactttgaacctgttttgtcatcagtggggtggagacaacgaagtcaccacccccaaccagcaggcactcggtgtttgggcctcatgtcctccttggtatcaatattagtagcagcaatgaccacaataacaaaagtaaatttttattaagcatttgctgagtgccagccactgttgttggaaatttacacatgtcatttaatttgtacccccacactctctggtaggctatatatgtgtgtatgtgtgtgtgtatatatatatatatatatatatatatatatatatatatatatagttgtttgttttgagacagagtctcactctgtcgcctaagctggagtacagtagcgtgatctcggctcactgcaacctctgcctcccatgttcaagtgattctcctgcctcagcttcctgagtagctgggactacaggtgcatgccaccatacctggctaatttttgtatttttaatagagacggggtttcactatgttggccaggctggtctcgaactcctggccttgtgatccgccagccttggcctcccaaactgttgggattacaggcgtgagccactgcgcctggcctcaggtagacaatattaacctcattatatggatgaaggcatcaagccacggagaagttagcccagggtaacacagtgaacatgtgatacagccatgatttgaatcctaacaatctggcttcaaggccctctgtgaaagatgaagttggattaattttctaaaaaaggactctgtcagctgtaacattctgttactctgaacttttcctcctgatttcttcccttgtcttctgcataacaccgtattgaattgtaagtgctagggaagccctgtgtgaattgaagattattactggggcagtgactcacacctgtaatctgagcactttgtaatcctaaggcaggagcattgctttagcctaggaatttgagaccagcctgggcaacaaagagagaccccagctctggaaaaaaaaaaaaaaaaaaagccaggcatggtggcatgggctcgtggtcccagctatagctacatgggagactgacgcaggaggatcacttgagcccaggaagtcaaggctgcagtgagctgtgtttgtgccactgcactccagcctgggcaacagagggagaccctatataaaaaagaataaaaaaagaaaaagaaaatttcatagtgttctgtgaaagtaaaattaatgctacgatatagtttttctcagattttttttttttagacggagtcttgcttgtcgcccaggctggagtgcagtggcatggtctcggatcattgcaagctctgcctcccggggtcacactattctcctgcctcagcctcctgagtagctgggactacaggcgcccaccaccacgcctggctaattttttgtatttttagtagagacagggtttcaccgtgttagccaggatggtctcaatctcctgaccttgtgatctacctgcctcggccctccaaagtgctgggattataggcatgagccaccacgcccagctgcttttctcagattttataagtaatatatacatatcataaactaaaacaatgacaaagtgtgaagcaaaaaaatccacaacacttacccagaaatgcagtaaatgctgtgaatgtttggttatttttttgtagtgtgccatttatttatagttgattttatactatatatttgatctttttttattgcaaccttcaataagagacagattttacactgtaatccaaacacgcacatacttatgtgtgtatgcttgatgaaataatacttaattttactgtatcagagatgcttccaaattttatcggagttgattccactccattctatcctattctagtccactgaaaattatttctgctacaaaaaagttggttgctacctgattttacagccttgtactgggttgtgacttgcattaaagaaatatacagtttgttcttacttttttccattttccttgaaacgagattactttcttaatattaaaacacatcctggctgggtgcagtggctcatgcctttaatcccagaacttcgggaggctgaggcgggcagatcgcatgagctcaggagttcaagaccagcctagccaacatggcggaacgttgtctctacaaaaaatataaaaattagccgggagtggtggcatgggcctgtggtcccagctactcagcaggctgaagtaggaggatgcttgagcacagaaggctgatgttgcagtgagccaagattgtgccacagcactccagcctgggcaacagaaggaggctctgtctcaaaacaaacaaaaaacaaaacaacccccccccatacccaaaaccataaagcacatcttaattataacgtgcagtggctgtctactatctcattgttgggatatactaaaatttacttaacaatttctaagttgttggaccttgagctgttcctctctctctctctctctctctctcacacacacacacacacacacacacacacacacaattttacctgacttttttttaaattattttttgagactgagtctcgctctgtcacctaggccggagtgcagtggtgcgatctcagctgactgcaacttctgcctcccaggttcaagcgattcttctgcctcagcctccccagtagctggtattacaggcttgccaccacacctggctaatttttgtagttttaatagagatgaggtttcgccatgttggccaggctggtctcgaactcccgacctcaagtgatccacctgccttggcctcccaaagtgctgggattacagggctgagtcaccactcctggccttacctgactctttgattacatttttttatttgtccctttgagtagaagggtagaatggaaagaatggaattatgggtcagagactgcatcgccttcagggctttggtgacctgtttcgtcatttacttgcagcatctgccttcctgtgatgagagggccctccatatgacagccagcttctcttccagaaggtggtgcccgtttactttccccgcactgatatcggagagcacctgtctcctgcatgcttgctagcactggagtcttaagaggcatatcttttgctaattaaaaggggtattttctccagaaagtattttttaaaaataatcttaaaaaatcacacatgtaaatcatcttcacagagaaaatttagaaaatacagggaagcaaaatctagaagagattaaaaatcatctgtcatttttccacccagagataacaattgttgacattttagtttgtgtccttccaggttttttccatctgtctgtgtgtgtgtgtatccatctatctatctatcatctacatatctattttttacaacaatagagtcatcttctctatcctctttggcaactcaccaaataaatgtgatttaggtaatgaatatgctttggggatactcagggctatcaaattagccatgatattaaacgtgataataagccatgacatgaaaaagcttgtaatccagtgggaagacccaagcctgaatccacagtggaaacagttttctgtgcttttctgcttccccttgcacctgctaatagcccccctgtgtgatcaacctgtctcccctagttttagatgaccacacaccgcaatgtaactgcacgcccccaactctctgcaccaccatctcccacgggatctactatatctactacctctaccccttcaacatagagtatcagatcctggcctccacagtgctctacgtcctatggaagaacatcgggcgcaaagttgacagccatcagcaccagaagatgcagttcaagcctgatggggtcacagtgggcacagtcctgggcctgaccgcgctggccgccaccattgccgtggtggtgggtggtgtacctgattcatattgggtgctccaagaccaagagcaagtcagcactcatcacgttctacctgtatgtcatcaccctgatgaagcttatgggggctgcggggctggctggaatccggatttacaggacagatgagaagtcactggatgagtccaaaaatccgccccgcaaactggactcggacctcttggtgggcactgcctcaggctcctggcttatctcctggggctcaatcttggccatcctttgtgccgaggaccacccccactacacctggtacaacctgccctactccatcgtggtgatcgtggagaagtacatccagaacctcttcatctttgaatccattcaccgagagcctaaaaaactctctgaggacatccaaacccttcggatggtcacagtctgcaatggcaacaccatgccccttgcttcctcctgcctcaagagtggaggtgtggccggagacgtggctccctggggcagggacatgccaccagcagccaatggaaatgtgtgcctgagagaaagctgtgacaaggaggagaagcacgaggagagcagctggggagggaacccaagcccagtccaccttcctcgtttcttacagggcaacgccaagagaaaagtcctgaggaatattgcagccttcttgttcctctgcaatactttggtaatctgcaccaagttattcttattcttttaattttgctgtaaactttcattttaggttcaaggggtacgcatgcagatttgttacatgggtaaattgcgtgtcgctgaggtttggtgcacaaatgatcccgtcacccaggtaatgagcatagtacccgataggtagtttttcaccctgcaccccacttccgacctctcccccagtagtccctagtagtgtctattgttcatatatttgtgttcatgactacccaatgtttagctcccacttataagagaggacatgaggtatttggttttctgttcctgtgttaattcacttaggataaggactccatttctatccaggttgctgcaaataatgtgatttcattcttttttaaggctgcataatattccatggtgtagagctaccacattttctatttattttttttttgagagagggtcacgccccattgcccaggctggagtgcagtggcatgaccatagctcactgcagcttcgacctcctgtgctcaagcaatcctcccatctcagcctcctgagtacctgggaccacaggcatgtgccaccacacctggttaattttaaaaactttttttgtttttgagagagagtttcactcttgttgcctaggctacagtgcgatggtgctcactgcaacctctgcctcccgagttgaagtgattctcttgcctcagcctccagaatagctgggattacaggcacctgccaccacagttggctaatttttgaaaatatttttagtagagatgggggtttcaccatgttggccaggctggtttcggactcctgacctcaagtgatccacctaccttgacctcccaaaatgctaggattacaggtgtgagccaccatgcctggccaaaacttttttttttttttttttttttttggtagagatagggtctcactgtgctgcccaggcttgtcttgaactcctgcgctcaaacaatcctcctgcctcagcttcctaaagtgctagtattacagatgtgaaccactgtacccggccataatacattttctttatccagtccattattgatggacatctaggtttctcttggcctttttaaaataaggaatggaggcagcttgtaataaaaatactgtaagtataaaattacaatataaggctggaaaatagacctatattctacaaatctacctactaaagacttgctgtgtgctaggggctgggctaggtactaaagattaaagtggaaagactcagtctctttcctctaaaaggtctcagtataatgggggagggagacaatgagcaaatctaatatagtgaacaggacaagtgctgagatgggcttgtgcaaggtgtactaggagcagggatccagaaggacttcagtgagtagtgggtgcttgaggtgaggcccagtgtcaatcaggagtgcttttagttgcaagtgacaggcaatttgattcacagtgtcttcagtcttaacaatgtttaattatctcatgagaattccggaggttggctgcttggggttggcctggcagctgaaccatgtcatcaggcatccaggcactgttcatcttgtcacttgggtggtgtggtgtttgttgtgacatggtcatgagatggctgcagctgcaccaggcatcacatctgggttcaagacagaaagcagtggggaagggctggtgccagacaatgtctctcatgtgggcacccctcactgcaagggaggctggggaagtagagggtttgcttcccagcctctctgatggaaggtagcaagggagaggaaggtgtacagtcactcacccatctgtctgcatcagcaaggaatgactggaagttcaccaggttatcaaggcggggaaaagcatttcaggcagagacacacaatatgtgaagacacagaggcaaaagacaccatggcatgttttgagagcaccaagtagtttggcataaattccatgtgtgttaagcagagtagcagaatgggaaataggagagagggcccaggtaggtggactctggcttgagcagggcttcctaggcctggctggagtctagtctttatgttgagggcaagggaagactctctcagatttgtgttttggaatgatcctcccagtagctgtgtgtagcaaggacggagacagatagggccagaagcagaaagactgggagagaaagccctgcaacagcccaggcaggaaggggaggagcttgaactagggcagtgatggagggatggagagaagaaaaaggaataagaagcattgtgtgctgttgggatttttttaaagacacataaaggaaggatggtgggggtcagtaagaaggagggggaagcagcctttgccaccgcatgagtctctgcagtgatggtgactggtggctggaggggagtgccccagtccacagaggtgcctgcccatcactctgggtgaagtcagctctgtgctactagcctctgttatcaagcctgctccctgttgccccagcagctcagaggcttttgagcttcctcccctgaatttcagatggtgcatacggggtctgcagcttttgatatcaccctaagaacacaaagttgggaaagtaagtcccttctaaagtcagaatggctgtgtgtctgccaagcaaacctgatccaccctagccttggatcacccaggttccttcagtttgctaggcagtgaggaggggctctgaaggtggaaggcccagaagagtttggctgcagggagaccctcttctccatctaacagacatttgccaggcacctgctgtatgccagggactatgtcaggggcacagcagtgagtcaaaaattgaaagagttaacaagagagatagatactgtaagctgcatttttttgaggtgcatattccaaaatgcaaattcttataaagtcagagctagttctagaatcttcctcaagtatatgctttttgtacatatcctgtgattaatattaatatacatatattttgagatggagtcctgctgtgttgcccaggctgtagtgcaatggtgcgatctcggctcactgcaacctccgcctcttgggtttaagtgattctcctgcctcagcctcccgaggaggtgggactacaggcatgcaacaaccatgcccagctaatttttctacttttagtagagacagggtttcactaggttggtcagggtggtctcgaactcctgacctcaggtgatctgcctgcctaggcctcctaaaatgctgggattacaggcgcgagccactgcttctgacctaatatttctttttaaaactaagttctgaaaagttgtctttccctggttgcctttttggttgaccactgggtgaaatacttggcttgcatttttggacccacttgaagaaagatagcactgtccgaaataccagaatcaagtggcaattcatggtctgtcaggacccgaaagccagacccagggcccagtccaaggagaagggtgggctccgtctcttcctccctgtgcttggcccatgatgcccccaggcactggttgggttctggggggttgaaccagaggatggaaatcatcgcagggtggagtcttaggatacccgtgctggctcatgggtggcactttgaaaccttgtggttgaccccaggtggtgccaaaggcatctggcagagagcaagagctgtcttctccagcatcgggagccagtccagaggccccagctgcaggtgctgatgtgcatgtccaggtggagtgggctccactccagagacggacatggaaatgttagttgaatttccaggagccgtggcactggagacaacagagggtggttgtggtgaccgggaagggcagggtgctgtgggagatgggtcagggaaggcctcttctaaggaagggtgtggatggggctgggatgagagactatcagggcagagctgcaggtgtggggaagggacggatgcaaggcaaggcagggctcactggacatgacctgggagcacagagcagagggcagaggggagaccacacagggcctgcgagccaagactcaatcctaaatgcaacagaaaaccatggaaaggtctacactgagagtgacgggatctgactcatgcttattttgttatatttttaattgtggtaaaaaactcatcaaataaactttcccattgcacccactttcaagtgtatagtggagtaaagtacgttcacattgtgcaaacatcacaccatccatttccaggttattcttgtctggcaaaactgaaactctgcccccattaaatatgaactccccattctccccagcccctgacaaccaccgttctttcagtctctaggaatttgactcctagactcctcatataagtgaatttgtggagtattagtccttttgtgattaggttatttcactcatcataacatcctccagggtctccaggttgcaactcgcaaagggtgacagacgccaaacatgacccctgccttcacacttgagttcctggggagatggtgatactatgttggagatggaggaggactctggaggaggggcaaccttgggagcagtgggtggaggtcagtgtggaaggaagaaccagagttaagtaatgaacgtgttctgtttcaggtgcctctgtggcatccaaatggacgaacccagtagacagatattttggttttctattgccgtgcaatgaactaccactaatgtatgacaaaagcaacatgcatgactgtttttgtcccatagcatttattgtgactcgtggctttgtgggttagaaattctggcagggcttggatgggcagttctgttcctcacagcatcaagtgaagttggtgaagccttggccagaagctccgtggtctggtgccttgggtgggggtggctgggaggctgggctcagccaggactcttgactggggcatccacaggtgggtctccagcatgacgtctcagggtggttggactccatgcgtgatggctgagggccccagagctgaccctccaaaagactgaactggaagctgcctgtctcctaaggcctgggcttggaaactgcatggtgtcatttctgccatattttattagtcatgtagtcacagagtccatctagattcaaagaaagaggtcataggccacttctcaataggataagtaacaagaatttccagccaactaaacagcacatataaagatgtggatttcagaaaagaggtcccattttcctgccttcctttcttctcccttttcctccctgtctcccttgcccttcctctcacccttcctttaaaaggtgtcccttaagtacctacagaggtacagggactgctatgaatggtgagggtacagcaatgaccaagatctctggtcttcctcttatggggcttacaaaccaggcaacagcaggtgaaaccatcaactgagcaagaaagacaccttatagtgtacccgtgttaagcagagaagtggaaaaggagggtgtgggaaatagctcttgggctgccattgtagatcagatggaccagcttagcgggaaggcctcgctgaagggtgacacgagacaggaaggggttggccacgcatgttcagggcagagggaacaatggctggtataaaacccccagtgggagtgagcgggtctggtttgagaaacaggaagaagggttgcctgcaatgtgggtggggtgagtggagagaagcgtgggtggttagaaatcagctaacagagcactttatcactccgtgcgggagtgtagaatttattttaaatattttgggaagactttaggggtttaatcaaggtagggacaggatctgatttccatataatgtaaatctggtggccgagtggaaccctagttcgagctgggagaccaggcacggggccaccgccatggtccaggtgagagaggccggctggacaggtggagagagagagccacaggtgggctgaagatactgctttggaggtgcacagtggagatgcgctgagggactggatgggagggggcatggttatgagagtaggagggagataaggttgacacctggagcctcgatggaccacctgggaggacgatgtagctgagcagatggagaaatggggaaggtgggttgagtttgagatgtgttttagacacccaagttgccaccggaaactatgagtctggggttcttggaagtggtccaggctggagattgagactgggaagtcataggcctatagctggtatttacaaccagggactgggagagagccccagggttcatgtgtagagagaatagaaagggacccaggaatgagccctggacgctggctaacattaagaggcagagcaaaggatgaaacagcaaaggagactgggagggacccgccgaacaagtaggagagctcctaagagtcacagcagccagtaagcaaagcagaagagaggggtcttggttccagggcccccgtggtgtataccaaatgcacagatgctcaagtcctatacttgcatgtaacctacccatcctcccgtacactttaagacatctctaaattacttagaatacctaatacaatttaaatgctatgtaaatagttgttacattgtattgtttagagaataatgacaagaagaaagtttgtacctattcagtacagacacaacaaaccattttatttttttaattaatttatttttattttttgagaccgagcttcactgttgcccaggctggagtgcagtggcatgatcttggcttactgcaagcttcgcctcctgggttcaagggattctcctgcctcagccccctgagtagctgggattacaggcacatgccactacaccttgctaattttttgtatttttagtagagatggggtttcaccatgttggccaggctggccttgaactcctgacctcaggtgatccacctgcctcggcctcccaaagttctgggattataggtgtgaaccactgtgcccagcctactttttgaatatttttgatctgtggttggttcaatccacagacacaggtccctggatacagaggtcggctgtatataccagggagtgttctgtatggagatacaaatgaaggctatgtgtctcagttacctattgctatggaagagaccaccccaatactcagcaacttaaaacaatgtacatttatgatttcatagtttctctgacttatgaatccaactacagttttagctgagtatctctgcacagggccattcccaggctgaaactgttggctggggctgcattcatttcaaggcttgactttccgagaggtggcagaggatttgtttccaaatctactcatgtgactgttggcaggattcagctgtggcttgttgggctgagggtctgagttccttgctggctgttgacaggggtactccctgggccccttgccgcatagggtgcttcgcagcatggcagctctgccacctgtctttcaggagaagatgagcaagagggatagcaggtccttttgcaacctaatttcagaggtgacttcctgtgtcttttgccatattttgtgagttggaagtgagtcattaggtgcatcccacactaaaggggtggggactccacaagagggtgactgcaggagctggggatcattgagggtcatcctagaggctgcctgccacagccagggagtggaggaagctgaagaagggtgcagcctgaagcgggagtgaggagcctgacaactcaaggggtggcagaaagggagagaactgggacagagaagagcctgagaagcagggaacagtgtgtaggttctgtgagcaacacaaacaaaagtcactgctttcagttttgcaaacttaattctcatctaagccctctcagacacgtgttagaattcccatctttcaaatgaggaaactgaggctgggcgagggctgtagagatggagagagttggatgggttcaaagagcactcattagggatggattgcagggaagggtgggtgaggaagtgagcaggatcatggcagacatggatttggtggtttctgtggagatgggaaatgccacgaggtctccttattgttctgtcaggggtgactcagtccccgtgcatcagggtcagctcccatgaggcctgggacttgagtggggcctccgtggtggcttggaagctgctccccaccacaggccattttctcttctcttgcagctttggatacctcccgcttttggctgtcgacctgagtatgacaatggattggaggagattgtctttggctttgaaccctggataattgtggtcaacctggccatggctttttctattttctatgcaatgcacgcagctgcctccctctttgaggtctattgtaagatatagtctgggtccacaagagactaacaagtgactaacaagagtgagctaacaagagttcattggagccaactgggaatggccaggttggacaaatattgcctgacaaacatgagaagggccaccttttgtctgcaaagattgtgcttcctgtgggctggaactgcccatcacccctgatgaatgtaaacaagttagatcaaaat

SEQ ID NO: 1990 - protein, 382 aa, Homo sapiens
MSQSTNEHKEWLITLGFGNITTVLDDHTPQCNCTPPTLCTTISHGIYYIYYLYPFNIEYQILASTVLYVLWKNIGRKVDSHQHQKMQFKPDGVTVGTVLGLTALAATIAVVTKSKSALITFYLYVITLMKLMGAAGLAGIRIYRTDEKSLDESKNPPRKLDSDLLVGTASGSWLISWGSILAILCAEDHPHYTWYNLPYSIVVIVEKYIQNLFIFESIHREPKKLSEDIQTLRMVTVCNGNTMPLASSCLKSGGVAGDVAPWGRDMPPAANGNVCLRESCDKEEKHEESSWGGNPSPVHLPRFLQGNAKRKVLRNIAAFLFLCNTLLWIPPAFGCRPEYDNGLEEIVFGFEPWIIVVNLAMAFSIFYAMHAAASLFEVYCKI

SEQ ID NO: 1991 - DNA, 1354 bp, Homo sapiens
  source (1)..(1354)
  CDS (201)..(1154)
cctacctatacttcacctacacttcagtacactctacctatatcttacctactctttagtatactctatctataccttacctacacttcactatattctacctacactctacctacacttcagtacactctacccataccttcagtacattgtatccctatttcacctacactttactatattctacctttactccagctatgcttcagtacattcgacctatatcccacctacacttcagcatattctatctatactctccctgtgcttcaggatactctacctgcaccccacctatacttcagtacattctatccttactccacctacactttattatattctacctatacttcacctacacttcagtacactctacctatactacccctgtccttcagtacattctatgtagacctcacctacacattacttttctctacctgtactccatctacacttcagtgtactctactcatactccacccacttcaatatactctaaccatactctgcctacacttcagcatactctatccatactccacctacacttaggtatactctacccatactccacctgcacttcagtacattctatgccacctaaactttactgttctctatctatactccatctacacttcagtatactttacctatactccacctacacttcagtatactctatctatactctatctacacttcagtatactctatctattctccatctacacttcagtatactctgtctatcctccacctacactttagtataccttctctatgcttcatctgcactttggtatactctacatagactccacctacactttactgttctctacctatactcaatctacactttagtacactctactcatactccacttacacttcattatactctacctatactctacccacacttcagtatactttatctatactccaccttcagtgtactctatcatctacactccacctacactttgatatactctacccatactccacctgtacttcagtacattctacttcacctaaactttactcttctctacctatactccatctacacttcagtatactctatctatactctacatacaacttcagtatgctctgtctatactccacctacactttagtataccctatctatgctccacttgcacttcggcatactctatatagactccacctatgctttactgctctctacctatactccacctacactttagcacactctacccatactccacttacacttcagtatactgtatctatactccacctacacttcagtatactctatctatactccacctacacattggtatactgt

SEQ ID NO: 1992 - protein, 317 aa, Homo sapiens [sequence omitted]

SEQ ID NO: 1993 - DNA, 2110 bp, Homo sapiens
  source (1)..(2110)
  CDS (201)..(270)
  CDS (404)..(1201)
  CDS (1330)..(1910)
agtatgcttaataaaagatctttctgaaatttaaacactttatgtaaaagggtacaggtagaaaagtacaattgctatttgaaaaaagctctgtttgttaatattgccttccaagatagtaagggtgtttttctctctcttcccttaaaatagacctatgacacccagagttgtagggtttgcaaatttggactataaacatgaagaccgtacttatcttatatacaaaaacttgccgcattgaacgaggcaggaatttctaccccagtggtagtggtctcctttatgtacataatgcagaagtgaaaattatacagtagtcaccgataggaaggaattgtatactctagtgccgtccggggattttgtgccgtgggttaagagttcttggatcgtcatccagttatcgaagattttcttattcctcttcttcatcatctttttgtggctcagttcgagaatgttcatctccttcctgtcatcggctgcttgctgctccttgagacaatccaacctgctctgcatcatgaactcgcgccgccgccgctgctccttggccttcaccaggtgctgcttcctctcctccttgctccagtagcgccccatcttcatctcgctcaccgcgtcgtcgtcggtggtcatgccgctgcgctcttcccggatcttcagggcgcgctcccgcagcaggcggtcccgcacgggcctcttggtgatgtagcgcgtcccgtcgctgcggatcttcaccttccactccatgcgcggctccgacggggtgggagagctcaggtccttgcacatgctcaccaggctcatctggctttgcgcgtactccacggccgacttctgctggatcagctgcatgtagctctggtagtgctgggcgtgcgccgggatgtgcgcgtgcttgtatggggagtggtgataggagggcaggtaggcgctgcccagcttctggctgggcgtggggctccggctcccgtcgctggctctccgctctttgctttccaggggctggttggggtccagctccttcagggacgggctataggtaggggtgcccacttcgggatcttccgtgatggagagcagattcttggaggctggcccgtaggcttccgtggtccccacagccccttcgctgctcgggcagctgatgccctccgccgctctcctcaaggagttgtcgggggagatctccagggtgagcggggtgctgcggcagctctcgcctgtgttgtaggcgctcgagcgttgtccttgtcggatttctccgggagctcggtgatatctgagagctcgtgtctgcgcacgtcgatgctggtgttgtagttgcggaagccgctgttgtgcagcatccaggactcgcggtactgctccttgagctgctgcatcttgtgggcgcgcacgatgctcaggcactccagctcgatgctgcgcagctcttcgttcagcagctccagctccttgtccacgctctcagggtcactcttgccggcgtccagggggccgctagggtagtacaggccgtaaggggtggcgctcttcacctggcacttgagctccaggagctcgcggaagcgctcgcactcgtccaccgggatccccaggtagtcggcgtccgtgcagtcggccgaaatgaaagactcgttgctgaagggcaggtcgccgctgcccaaggtgtcctggctgcaggtgagcttcctctgccccgccagcgggttggaggatgcggtggcgtcgtcgccattgttctcttgctccgagctctcgtcattacgggtgctctcgtcggtccgccccacaccgctgtccttctcgtgctggttggacaagatggtggctgtatctgtggtcccaccgtcttcgtcgtgcttcttctgcataaacacaagaacaaagggtcacagtgagggaggcctgcgcagcaggtactcaggtttgacctttccttgcggtttctggatagggcaggctgtacatttctaaggccaagggacagcatctgacagtaggaccacgtcaatagcgtgggccttagctacacctacccgtatctacctgggcaagtcacttattcttgttcttgtcctcagttttgtaaaatgaggat

SEQ ID NO: 1994 - protein, 482 aa, Homo sapiens
MKTVLILYTKTCRIERGRNFYPSVIEDFLIPLLHHLFVAQFENVHLLPVIGCLLLLETIQPALHHELAPPPLLLGLHQVLLPLLLAPVAPHLHLAHRVVVGGHAAALFPDLQGALPQQAVPHGPLGDVARPVAADLHLPLHARLRRGGRAQVLAHAHQAHLALRVLHGRLLLDQLHVALVVLGVRRDVRVLVWGVVIGGQVGAAQLLAGRGAPAPVAGSPLFAFQGLVGVQLLQGRAIGRGAHFGIFRDGEQILGGWPVGFRGPHSPFAARAADALRRSPQGVVGGDLQVAEAAVVQHPGLAVLLLELLHLVGAHDAQALQLDAAQLFVQQLQLLVHALRVTLAGVQGAARVVQAVRGGALHLALELQELAEALALVHRDPQVVGVRAVGRNERLVAEGQVAAAQGVLAAGELPLPRQRVGGCGGVVAIVLLLRALVITGALVGPPHTAVLLVLVGQDGGCICGPTVFVVLLLHKHKNKGSQ

SEQ ID NO: 1995 - DNA, 17491 bp, Homo sapiens
  source (1)..(17491)
  CDS (201)..(466)
  CDS (727)..(1074)
  CDS (1203)..(1858)
  CDS (10608)..(10749)
  CDS (10899)..(11031)
  CDS (13696)..(13951)
  CDS (14076)..(14155)
  CDS (14722)..(14832)
  CDS (14963)..(15023)
  CDS (15267)..(15369)
  CDS (15507)..(15587)
  CDS (17024)..(17291)
  modified_base (7324)..(7423): a, t, c, g, unknown or other
  modified_base (16812)..(16911): a, t, c, g, unknown or other
ggcgcaatcagggagggctttccagaggaacaggcgtgaagaactgtggaagttagagttggggagaggcgtcctggctgtgtcgcttcctcattgcgcggctttggtcaagttatttgacctctccaagcctcaggtggccctgtaaaaggtgactataatgactgcctagcagggttgctaagaggagtgcccgaggcatggcggcgccgcgtggagcagggcgctgggaggcggcggccctgcggcgtggcgcggctggagcgcgtggcgccggggagggtccccgacacgccttcccccaagctgaccccaggtcacccctgcagggcgcccgaagcgcccgcacgcgagggggcggtccccggaggctccgccccgacggtccggccgcggcccaggccgggaggtggagcgcggctgccgccagctggtccactgacaactgctgccagctggaaggcgcgtagggcgagaggtggcgcgtcctcagctttccagtcttcgattccgcccgctttccgagtgagaaacgcaggcctctctcttccgtgaagcagcgtcttgtctctgcacctcctctgtgctgtctctttaagaggtcagcgggctgctccgcctcttgggaatttgattggtctctcccacttttttttttttttcccccagtgatgacttattcctataggctgctggaggttagagggcgggcctgagtgataacagggactctgggactctgggacttgtgggactgtggccgttttcgcaatttgggctggacgaaaaagacggtcttgctttcccggtcgccgctgtcgggaagggctgcagggtgtccgcgagacccgcggcccggcgagctgaccccgcctcgcctttcctgcctagccctcattccacggagccggtcgcgcccggtccttgcgcgacgcttcccggcccaggccgcctggtctggcgctggaggccggagtcccgcggcctgtgctggatccgcgcacacccagtggcggcggatgggcggccggggcggccggggcggccggtcctgagcgcggcccgggctgtcaggtaaggaggggccttctccccgtctcctgccgcagctagagggggagccccgtccctcgccccggcgggaagcccagccgccgttcccctccttgctccgcgagcggcccatttccgctcgggcgcagctcggacggccaaggcggcgtttgggagggaaggccctggatgtgggaacccacgggaggggtgccgggcagtcgggagtcgctcggggcgcgggggcacgcgaggcccgggagggagccgcacgtagcggcgtcgggctcggccccggctggaggcagtgcgggtggagatccggacctcggcgacccggtccggcgcggggtggcggcacgggctccagccccacggtggctgcccgcagcggccgaggtgctcctgagccaagcctgccgccggttcggggctttgctgccccgtgagggggccatgtcgaagcctccgctccctctggactcggggaatgcaggtgggggctggctttgccctcttctctgcagtgaggaggggccgcagggtcgtccagtccccagcggggcttggcggtgctggagattcagttgttcccgtcataacaacctgttgagggctcgtgtcgtgccaggccttgttctaggggaccgagtcctgagcactcccgggatagagagtagtaaatacccagacgcggctcgggcgctggagacagctgagaagggaaggcttctcagaggaggtgtcaggagagagctgggggagagccagcccaaaggccctgaggaacggaccagctcagcaggtggaaggcaagcagggagggcaaggtgcaggtcagattgggcccaggcctccccatcttactggggtctccggcttaggacagggaccacacgcctgccagccccaaggccgaaggacaacaggggagagcaaagtaacttacttggcctctgccctatggagccttccccaccttgtcacccctgggctccaccccttctcaccacccttaggccctagggtttgtaagctcaacaacccgtcggtgtgggaagcactgagggcccctctccccagggtttcctatccggtagctgtgggtggggtttggtcaatcctgttgcacagatgagagagcagggaaagctgagtcccagagaggagagagaaggccttacccagtcgttctcagcgggtcctgcattgcgtgaccatgacctgagcctagccagcatcctgtccctcaactgggtgggagggagggaggcagaggcccctggaatgttgtgagtctgggagactcctcccaggtggaagaaacagtctgtcccagtttccctgttcctgggaggcctggggttgcccagggtgctctgcaccgcaggaattcctcctctgagaatcacccctgggctccaccccttctcaccaccccttctcaccacccttaggcccctatcgtgagctgaccaacccctcccacttctttgtcagtgcttgggagcatcagtctaagagaactaagtagagaaggctgaggactgaccccttctctgcctctcctctcctctgtataaggggacagtaattgtcctctctcccttagaaggcgatgccattgttaagtgtgtcaccacgtgtaaagcactgagcaccatgtctgcacataggaagtgtgcatcctattaactaaaagtcagtgcgggccaggcgcagtggctcatgcctgtaatcgtagcactttgggaggctgaagtgggtggatcatctgaggtcaggagtttgagaccagcttggccaacatggtgaaaccccatttctactaaaaatacaaaaattagccgggtgtggtggtgcacacctgtaatcccagctactcaggaggctgaggcgggagaatcgcttgaatccaggaggcggaggttgcagtgacccaagatcgcaccattgcactccagcctaggtgacaaagcgagactctgtctcaaaaaaaaaaaaaaaaaaaagtcagtgcttcagttatttcctaagctttgatacgtaatggcaatcctggtatggccagcagccccataaccccagtgtggttgctggatcaagtagcagcagcaggggcaccacctgggagcctgtgggaaacacagactgttcagccctacccctgcccttgggagcagcatctgcatgttaacaacaccagggtatttcccacatcaggtctgagaagatagctctagaacaagcctggtgctcttgacccacaggtggagaagccgaggcctggagaggggcacctggcaagttgttgactgggggcctgggctctggagacagacagcctggattgctggcctggcaagtggctgcccctctgagctccacgtgcacaatgcggataacataagtacctccctcccagggttggaggccagggctcagaggttaggcacagaggttactacgttgttggcaggggagtgggggcaggcagagcagctgacacctcctctgtgtttcctcagaccccacagcaatgggggcttcacaagaggtccatggacctgggaaccaattcctttccctccttgcccttcagtctcttctctggtaatcccagcaacttgggaggctgaggtgggagaattgcttgaacccgggaggtggaggttgcagtgagccgacatcgcgccactgcactccagcctggacgacagagcaagactctgtctcaaaaaaaaaaaaaaaaaaagaaaagcagcaaccacctttgtacatgtgtcacttttgtagatgtttacatccctggttttgtttgatccttacggcacccttattaggcagatgttgtccccatgatacttggagggggagtgactcaccccaggtcacacagcaagcacgtggcagaaccagcagtgcagccccgtcttgttgactccaaaatctgtgttagctggaggtttttcactggtgaattagagaagtcagactcaaactggcctaggcagaaaaggggatttgttgggttttataactgaaaagtccaagcgggtaggactggctttggatgtggctgaatccaggggctccagtgagctcatcaagatctgtctccatccgtgtctcagctctccactcctccgcgtcggctttactctgaggcgggtacctgagcgtgaggtcaaggtggtacagccctgacttactgagctcagcagagagtgtttcctcaattgtcaatgagaatctgccctgagacttttgctctaataatttattctaataataatttagatcaaaagcctcagggcagattttcattggccagggtgatggaacatcctgactagccagacttagatcacaggtgcattccctgggttgtgaagggttagtcacgcatccctaaacttccagagagtctagagtctgggagctgagtttccacctcaggaaaacggtgctcttaccaactggcagcagcctggatgctgggcaggcaaaaccagaagcccaccccgccctccataccctggactctgcctgactcccccactctcctactccctgcccctgttcctccccactggcctctgtgcctcaaggggcctctcagcttgctggtgactgctgggtgcctggcctgcaccctggccctgcccgtcttggggctgcgtgacattccattctgggtcagagttggtgctgggctgctaggaccaggcgttcactctgcctggcttggctttataataggggtggggatagctggtcatggtggcccacacctgtaatctcagcactttgggaggctcaggcaggtggatcacttgaggtccagagttctagaccagcctggccaacatggcaaaaccctgtctctactaaaaatacaaaaattagccaggtgtggtggtgcacacttgtgatcctagctacttgggaggctgagatgggaagactccttgaacccagaaggctgaacttgggaagcagaggttgcagtgagctgagattgcaccactgcactctagcctgggtgacagagtgagactttgtctgaaaaatatatgaataaataaataatggggtggggaggagagggctgtagaatctccctccttcatcaggtcactgatactctcaactcaaagttacaagttattatctcatgccaccagaagtcatgcaggaggcgcgctgcacacccgcttccagctgtaagctcctgcatgctcagcgtggtggcccagtcctccaggggtgcaggaagacagttctggacaccccacacaggcacagatccccccatgaggcatcacatgcctttgcctcaaccaactgctggccaggagcagaagggccacccttcttgacttcgaccagagccactctgcagggcatgctagctgtaggggaagacagttagttactcatttggcagactgtcctatgcattgcagacatttggcagccctggaccctgcacacaaaaaaatccacagtcctccattccctagcagttgccatgtcaaactagagcagtgctccacaccggctccaccccagagaccattggctgaaattaatggagactcaacttctggtcctggggaggggcccctgcttgaacactaggttttatggagggatcctgaacaaaatagtagcttgttagtgaggaagaaggggacagtgtctggtggtcagtgttggcctcagttgcaaaacatccagtgactcaggccagaaactgcaccatcagccgtctttggcctcttctctcattccctgtgtttgatctgtcagtgggtcttgttggccaagcctcccaaaggtctcccaagtccctctgttccacctgcactgctgccactagtgcaagcctctgtcctctcatgcatggactgttgcaggagctcctcatggcctccctgtctctgttcctcctccacttcagtcccttttcactggcatcctgtccccatggaaaccagacctctcactccttgtaacacccttctggttgcacttagagtgaagtcgagttgcatgtgggacctgggccctgccaacctttctggtatcagctaccctggcctgttttttgcccttgggacaggccaaacctgtttctacctctggacttgtgcatctggatcttaggtgattctccctggaatgttctttatctcgatctttccaaggctggctcctgcttatttattgagatctcggctcaaaatgtcaccttgtttgactacccagtccaagcagtacctttatattcattgggatttgggctagctgttgaaacaaaggctaggataataaaatagattatttttatctatgcaggcagcctctgtgcaagctgtccagtacatgcacggaggcctcattgtgctggggacccagacaccttctttctcattgctctgttaccctcgtacagggtttctgcctcgtggtctgaggaggctgctcttgctcccactgtcgtatctatattccagccaccgggaagggaggagggcatgatctgaaattagcagacctcactctgctcgtgtcatatgtttataacaaaaaaaaagttctttttaaagacaagtcagggtttttatctttgttgggcctctgttttagagtttatgtcttcacaccatgggattagatcaaatgacaggctgaaggactgtcagcctgtctcagctcgtgtccagttggataaaactcagccacatggccacacccagttgcagggaagctgggaaaggtccccattgtgctgggaagcgatgtgtaagctaaactccattggttccatcactaaagggaagggtagatgttgggggaacccagcagtctctactgtgtttcttgtcattctgctccacctctctgttttcttcacttagcatttatctttagaagtttgcttctttttttttttttttttttttttttttttttttagacagggtctcactctgtggcccagcctggagtgcagtggtgtgatcatagcttgctgctgcctgctgcctggagctcctgggctcaagtgatccttccacctcggccccaccgagtagctaagactacaggtatgcaccaccatacctggctagttttttaaactttttgtagaaatagcgtcttgctgtgttgctcaggctggtctcaaactcctgggctcaagtgatcctcccacctcggcctcccaaagtgttgggattacaggtgtaagccactgtgcccnnnnnnnnnnnnnnnnnnnnnnnnnnnnnnnnnnnnnnnnnnnnnnnnnnnnnnnnnnnnnnnnnnnnnnnnnnnnnnnnnnnnnnnnnnnnnnnnnnnntttgtgtttgtttgtttctttttttttttttctgagatggagtttcactcttgttgcccaggctggagagcaatggtgtgatctcagctcaccgcaacctctgcctcctgggttcaagtgattctcctgcctcagcctcctgagtagctgggattacaggcatgcaccaccatgcctggctaattttttttttttttttttgagacggagtcttgctgtgttgcccaagctggagagcaatggtgtgatctcagctaaacgtaacctatgcctcccgggttcaagggattctcctgcctcagcctcccaggtagctgggattacaggcatgtgccaccatgcccggctaatttttttgtatttttagtagagacagggtttttccatgttggtcagggtggtctcgaactcctgacctcaggtgatccacccgccttggcctcccaaagtgctgggattacaggcgtgagccaccgtgcctggccctaattttgtattttttttttttagtagaggcggggtttctccatgttggtcagtctggcctcaaactcccaacctcaggtgatccacctacctcagcctcccaaagtgctgggattacaggtgtgagccaccgtgcccagcctttttttttttttttttgagacagagtcttgccctgttgcccaggctggagtgcagtggcacgatctcagctcactgcaacctccacctcccgggttcaagccattctcctgcctcagccttccaagtagctggcattacagctggacgccaccatgcctggctaatttttgtattttttagtagagatggggttttggcatgttggccaggcttgtcttgaactcctgaccgcaagtgattcgcctgccttggcctcccaaagtgctgggattactggcatgagcctccgcacccggccaatttttgtattttttgtagagatgaggtcttgctatgttgcccaggctggtctggaactcctgagctcaagcagtcctccctcctcagcctcccaaagtgttgggattgcaagtgtgagtcactacaccctgctgtccttactgtttagatggggacttgatcccagagccagtgagtggcccactggagcaacctgagccccagcccatggcccgcccccttcagagtcttccctccctttcatccagaggtgttctggtgtttaagggcttggaccagcaatggaaatattcctaagtccccccacccctgtcttgggctgctattgttcagggatagctttggtgacaacacaagcagggctcctgttgcgtttctgcagaccttgctgacaggcatgcagctcactgggcggctccttgctgaaggggaggcctgggcctttgatgtgttgtcgggacaaatcttttttctttttcttttttttttttttttgagatggagtctcgctctgtcgcccaggctggagcacagtggcaccatctcggctcactgcaagctccgccacctgggttcatgcaattcttctgcctcagcctcctgagtagctgggactataggcacatgccaccatgcccaactaatttttttttttttttgtattttagtagagatggggtttcaccatgttgtctaggctggtcccgaactcctgagctcaggcaatctgcccgcctcggcctcccaaagtgctaggattacaggcatgagccaccgcgcccggccacatcttttttactttttaaaatttactgaagtacacctatgacttaggagtcatcggtgtgtggcttgatgaattaccacacagtgaacacacctgtgtacccaccacctggatctgacacccagacgctggcaggcctcccccaattaccatgcgcttcatctccccaaaggcgccctgtctgcatttctccacggatcatacgcctgtcggcccttgtgcctggcttcacgctatatcacttctgagagtcattcgtgttgcctgtagcagtgggttgttctttttatgctgtgcaagtgtcaaccgtaggaacctgccaccatttatgcccatgctctggggctgctccccgcctggggctgtcatccacagcctttacaagcattcctggtgaagcagagtcacaggcatctggcccaatctgttcaaatcattctaaatgttggcatctgttacgttctgggtgccccaggccacacctggatcaccccgaactccctgcggaagtacctgttgctgcctcctgagagtcctctagcttaggagtcttggttttccgaccagaccctcagtcccctaaccccagagtggttcccaggaccccagaccaccagctctcctgtcttccaggctagactcgacctctcatgctcagagtgtcatgtggacctctggcctatggacccaccctgtccctggcttcaccctgcagcgtggccattgcagacacacttgccttgcccctctgtggtacagcctcttcccccatgcccatctccagttggagacctcctgtgcatcttctaggcatggctcagtgtcccctccatctttgtctgtggtggcagagggagacaagggccagagggtgcaaccgaggagggcatggtgctcagctctggccctcagcagcgctgtggcctcacacaagtcagtggcctctgagttctgcatggtgtggcaggtcagaaccatggctgaccgctaccaagaactcctcacgtgtgtgccttgtttgaggcactcggcatcaccacagcctcacttgttacacccattccatggtggggggacacaggcacggagaggacaggaaggaaggggcagggctgggctgtgaacccagagcctatgctcttacccacgctgctctcatgggccctcaggactgaaaggagccaagtggctgtgccttgcacatggagatgcttagctgagggggtggctttgttagactatttgcaggtcgtgagatagagcctgagatgggggactgggcccctgcctgggggattgggtcgtgacctgtgtggagccccacactgagctgcagtgggtggggagggtggtttacaggggtgctctgtgcagcccctctgattttcccctgggagtcccaggtccaggggaaggaggacagtggcccaggccacacagctcactgggcggctctcactcccccagggctggctgctggcgggatggacaccctggaggaggtgacttgggccaatgggagcacagcgctacccccacccctggcaccaaacatcagtgtgcctcatcgctgcctgctgctgctctacgaagacattggcacctccaggtgaggcagtcacaacgctgggcaggctcgctgagtgtcagtggcttttcctggtgtaggggggtggtgagggtggggcagattgtgtcttggagagggggtgcatatgtggcctcgccagtgagccagctcctgtgcccatccgccagggtccggtactgggacctcttgctgctcatccccaatgtgctcttcctcatcttcctgctctggaagcttccatctgctcgggcgaagatccgcatcacctccagccccatttttatcaccttctacatcctggtgagttcactgcagttgacagaaaagccaactccaactgggttaaacaaaaagggaattaactgcttctataatgaaaataagcttcaggtatggctggatccaggcagttaaatgatatcgttaggatctgtttctgcatctctgatctctttgggacttatctcagatgagttcccctcatatggtgtcaaagatggccaggagcaactttgagctaacatcctgcctctacaactcaggcaaacagtgcctgtttgctgatagtgccagtgtagacctgggatttcctctgactggcccacctaggatcccatcctcatccctgagccaagcactgtggctagcaaggaaaggggcactgtgaagctgggagggcagcatcagctcagctggaccatatggactgagggagcccacaacagaattggggagctggtactagaggggaggggaatggatgctgggtggggaaaatgcccactgcatcctccatccattcgtcccccatctgtccattctgtgaaacctctttggagaagacatcttacttgctgggagagcctgcattgtcaccacttggtggtcctggcacgtgttgcctggggagaggtgtcagggctgtggttgagaaggcagctccaaatgtgggctctcctggtataggctccaggtgtgggctgtcccagtataggtgccaggtgtgggcttcaggtgtgggctgtccaggtgtgggcttcgggtgtgggctctccaggtgtaggcttccggtgcgggctgtcctggtgtgggcttcgggtgtgggctgtccagctgccttccttcagggcgcccttcccctgtctgcagggcctgcctgactggagtcctcccttctctgtggcccttagataccaccacatgagagctgagtggctccctggtcccctccttgtggtctagcccagaacttcccagtcagaggagtgggctgtgggcaggcagagagacagacaaggggctggggaagcctggaggttgtagtggcctgatgtccctcacacctacaagatggtggtagacaggactgggaactgaggcctgctttctttgcttctctcccactgcttctctcaccatttattcatttgtgtatttattcaacagatattaaacacctactgtatgctaggcagatgtccttttgtggggtaagggggagtgcaggcagggagaaagagccagggctaaatgtccaggaacatataacagggcccagcccatcaacttttggggactttgtcctaaagagttcaggaggcagtgttaagagtggactcaggaagtccagctctgaaccccagccatgctgctgtgtgacctggggccagtggcttggtctctctgtgccccagtgcccttctgcataacagatgttgatctgctttagctatggtgttcatgtgagcacctatgaagtcgtctgcatagctgcagcccagtgggagcctggcatacagtaggcgtgtggtagtttgttgcttttactgcctgccctgctgacacaatttctcatggcacaaaagacagagtatatatggatctgggcatgtgtcagaagacccaactgagactcacagaagccagtttttgactgagaaactgggcagttcctgggcctcaggcacagcaggatttgggggcacagcagtgctgctggggcaccatctccatctcccactcagcctgggatctccccgatggccctgctctctcgccatctgcccttgtggcagcagggtggtgtccatggtgccaggcttgcatgctgtccgtctgcctttcccagcagccccacctgacatcctgggtctctctcacaaggctcccttggggcctatgcccttccctgaactagccctgaggccaggggaatggcacacaccactggccagtgctgcgtcccaggcccatccctgaagccaggagcggtggactcagcctcacctggaaccaccgaagtgggggtgagaagggagaggaaggggatggatataccaggccgataagcaccacagatgctgagcaggcactttgtgaaacctgctgggctggtggcttccctagaggtctctgcacctcttctcggtgaccttttgcctggtcccgcatgcctcagaattaaaaccatgaatacggtaataacagcaaatgtatacttggcccttcctgggtgccaggcaggcttctgctgcatctgttaatccatttgacccaacaatcaaacacagtaggttttgtttctgcccccattttatagatgagaaagctaaggtacagagccaggaagcagcagcgtgctgcttgtgatgtgaacctggcccatctggctccaccatggcgcactcctgctcaccagcccaaggctgttggtgctagccaggaagctggggccccgagagggagggccaggctggaagtcacctgcagttgagggtctgcaactctgtgagccttgcttcctggagtgatccccacctccctgtgtcccaccctgactttgcgccttcctcctttccgacctcaggaatcaaaggctcctgtagatatgggggtgggcttgctgcccctgccgatgcagaggctcttgttccctgactgccacaccactcccttgcccaccaggtgtttgtggtggcgctggtgggcattgcccgggccgtggtatccatgacggtgagcacctcgaacgctgcaactgttgctgataaggtgcggctgggccctctgagggaggccagggaggcctggcctggggtgggctggggatgctggtccaggctgacgctgtgcccactctgcgtgcagatcctgtgggagatcacccgcttcttcctgctggccatcgagctgagtgtgatcatcctgggcctggcctttggtgtgtgtaccgctgggctcttgggccctggcgatgctctcccctgcccctccctggctgtgggctgactctggagtggtcacctgggctggctcctgcctgctgaccagcatgtttcttccaggccacctggagagtaagtccagcatcaagcgggtgctggccatcaccacagtgctgtccctggcctactctgtcacccaggtaagagggtgagtgtgggcaggggacgctaggagtcagggcaccaggcacccactgcttctgggtctgggtcaggtttccagtctttatcaccttcagagttctcaaaactttgcacctgagaaatcacatggggtgcttgttaccgaggcacattctggggtcccctggagatttggatccagtgggccagggcgccaggatgggaggctcaggacttgccgttttaataaggagttcaggtagggatggtgcaggtccgcagacccccctgagaagcatgcatctagaggcccctttcttagattgggggcagggactgcaccttgtccatctctgcccccttccccatgtgactcagcccaagactgggccggctctggatgctgcaatcagttgggcaggacatggccagggagcagactggggcaggtgagttgagggtcaggccaagaggctgaacttggtgtggtggagagcttagggggctttgcatcagggaaagcccctgggagagagaagccttgagatcctctcccttcctcccttcctgcttgcccctgcaggggaccctggagatcctgtaccctgatgcccatctctcagctgaggactttaatatctatggccatgggggccgccagttctggctggtcagctcctgcttcttcttcctggtgaggttcaggctggggcagctggggtggctggggccttagggccaggtagggattggattcctgggtttctggctgtgggtctgggctggcgcccccagcaccttctcagccctgcctgtctctgtaggtctactctctggtggtcatccttcccaagaccccgctgaaggagcgcatctccctgccttgtgagcagctggccggcggctctgggacaggcggggatgggagggagtctaccgggccactgtagagctggtagctgggagctggagctgtagagttccaggctgggagctggagagccctgggtgagagggaggcctagaggggccccgggggacacaccaggcttgagggtagtaggtgctggaggcagagcctggcctgtccagggtgggacctcacgacccaccctgtccggcccccagctcggaggagcttctacgtgtatgcgggcatcctggcactgctcaacctactgcaggggctggggagtgtgctgctgtgcttcgacatcatcgaggggctctggtgcgtgggggccgcagggtgtctgcctcgtgggggcatgggaagtgggcggcagggtgtccacccgctgggggcatggggaggtgtggagtcagcatggggctaggaggccccgcgctgacccgccttctccgcagctgtgtagatgccacaaccttcctgtacttcagcttcttcgctccgctcatctacgtggctttcctccggggcttcttcgggtgagtctgtggccgccggcgcccccgcgtggctgccggcggaactgcgccttcttccagcatgggtgtgaggattgaagctgagaggctgtgtatgcatacagtgcgcatgcgcacgcacatacatacatgcacttgggcacacacatacagatacacatgcacatgcacacagatatacgcacacccacccacatgtgcatggacacgtgcacatgcacacacggatgcacaagcatgcacacatgcacatgcacacacaaacacgcacatacggatacacacgggcatatgcacacaaacatgcacgtgcacacccacatgcatgcatacacacatgaacacgtgctcaacatatacatacatgtagatatatgcacatatccacatatacatacatatatatgcacattgtatgtacagtacacacagacatactctccccacgagagagagagtgactatgcacggtgttctacattgctggtttttatttaataatatattaactcattcattcgcaagcattcattgagcacctactgtgtgccagacactgctagagccagaagatgcgaggcccacagcggatgcaaatcctgtcctcacaaagcttgtaccctgttgggggaagacttaagtggggagcaggtttggggtgggaagtcagttggattctctgggggtgagtacactgctgtgcacatgtgcatctgcagaagcgtctgtgagatgggatgctgaagacatgggattgggggtcccactccagaccttaatgtggtcggaatgtgggtgttttgtcccccctttctcacctgccaggtcttgtggggaggggatcagcctcccacctgggtgaagctgggagagggccagactggtccatggccccagcttggatctttgcacacaatttctcccctgagcctcaggctcctttttgtaaattgggtgtagtgtgtcccccttggagagttgccctgagggccgagggacgaggtcagagtggagtgggtggtaacatgagcagcaggggtcacaggagtgggggcggaggccacagccaatgtctcctgagtgcttgggcaggcactgttgaagcctcatgatttatgtccattcttcctccacacggtgtccacacacccatttcaccatgaggaagcaggcacagatgccccccgcctgagctcacacagccagggggaggagggctggggtnnnnnnnnnnnnnnnnnnnnnnnnnnnnnnnnnnnnnnnnnnnnnnnnnnnnnnnnnnnnnnnnnnnnnnnnnnnnnnnnnnnnnnnnnnnnnnnnnnnnaggcgactgttggtcaattccttccttatctggtggccccatcagcctggagaggaaggctcttcctgaatcactcagtgaggcttccatgcccctcttttccttttatcagctcggagcccaagatcctcttctcctacaaatgccaagtggacgagacagaggagccagatgtacacctaccccagccctacgctgtggcccggcgggagggcctggaggctgcaggggctgctggggcctcagctgccagctactcgagcacgcagttcgactctgccggcggggtggcctacctggatgacatcgcttccatgccctgccacactggcagcatcaacagcacagacagcgagcgctggaaggccatcaatgcctgagggcagctgccagggcctgtggaggacaggccagagaggaggccagcaggcccagagtccccaggggaggaggaccaggtcaagggacgttctgtgggcagtagccctgtgtggccctgttcccaccatgagtctggaggccccacctccctggggctcccaatcccctttgccatctctgctctcactggggaccctcc

SEQ ID NO: 1996 - protein, 834 aa, Homo sapiens
MAAPRGAGRWEAAALRRGAAGARGAGEGPRHAFPQADPRSPLQGARSARTRGGGPRRLRPDGPAAAQAGRWSAAAASWSTDNCCQLEGADSGTLGLVGLWPFSQFGLDEKDGLAFPVAAVGKGCRVSARPAARRADPASPFLPSPHSTEPVAPGPCATLPGPGRLVWRWRPESRGLCWIRAHPVAADGRPGRPGRPVLSAARAVSSDGQGGVWEGRPWMWEPTGGVPGSRESLGARGHARPGREPHVAASGSAPAGGSAGGDPDLGDPVRRGVAARAPAPRWLPAAAEVLLSQACRRFGALLPREGAMSKPPLPLDSGNAGGGWLCPLLCSEEGPQGRPVPSGAWRCWRFSCSRHNNLLRARVVPGLVLGDRVLSTPGIESSKYPDAARALETAEKGRLLRGGVRRELGESQPKGPEERTSSAGLAAGGMDTLEEVTWANGSTALPPPLAPNISVPHRCLLLLYEDIGTSRVRYWDLLLLIPNVLFLIFLLWKLPSARAKIRITSSPIFITFYILVFVVALVGIARAVVSMTVSTSNAATVADKVRLGPLREAREAWPGVGWGCWSRLTLCPLCVQILWEITRFFLLAIELSVIILGLAFGHLESKSSIKRVLAITTVLSLAYSVTQGTLEILYPDAHLSAEDFNIYGHGGRQFWLVSSCFFFLVYSLVVILPKTPLKERISLPSRRSFYVYAGILALLNLLQGLGSVLLCFDIIEGLCCVDATTFLYFSFFAPLIYVAFLRGFFGSEPKILFSYKCQVDETEEPDVHLPQPYAVARREGLEAAGAAGASAASYSSTQFDSAGGVAYLDDIASMPCHTGSINSTDSERWKAINA

SEQ ID NO: 1997 - DNA, 16119 bp, Homo sapiens
  source (1)..(16119)
  CDS (201)..(307)
  CDS (2130)..(2260)
  CDS (6619)..(7556)
  CDS (15749)..(15919)
aggaaacatacactgagattagaaatggctcatgagagccttccctttattgtagtctgggattgtcaaatccagtgatgagaaaggcagcctggcatgagaaaatgacgtctgcccttggtttgtggaccatttccacatcaagccaacaggaggctgccagcttgcagggagcttgcgtggcagaacagtttagagtcatgcgtggcaacagtgctacctccttgagttcagtgggcctgggactggacagtgccatttggaccaggaaaaatgagagaagaaaggggagctgtgtgcattatgagtaaaagaaaagccagccagtatgaggcaaacggcattgtctgcgtttgtcaaaggctctatataatgcttcccaggcacctcggggaaggctggccatgatctacagcaactgggcaagcacaaggggcaaacagatgggcaaacacctgactcagacaccctgggattctgtttccttctccaattgtgcttggacattatgccaaaggaagccaggattcaaatgaggcaaggttttgcctgcagtttcccgagagagacccagagagatcagctgaggttaaaaccgagaggagaggcagggtcaaggttgaggatgcggttgcaccattttccccgtgggcagatcatggacgagggttctctggttgtctgcttttaataaattttcatccctctagctctgcttccaagacccagcttctttgatgtcctataggtattgagttgagtactggcaagttcaagactacggctgaatgccaagattctgtggttttggaaggttccatggatctgccccacccagccaggcaggggacccacccaaagcctgagctgccaggtgaaaccagaatcatgcttcctgtgggcctctgctctccaatttaggagtgatcaattccatagaaagttttaaagaatacctctctcaaatcaccagtgtttgctgcacgtgctacctgtgaggcacattgctaagtaccctgaaagctaccaatgtgaatacatcttaagcctgcaggtgtaggaagactttggagtatttgaataaatcagtgaccctatggggaccgcattccccatggatctctcgcctgctacccagagtccagtgtcgaccttccacttagttctcttttctatcttctgccttaggaggcagcatggcaaagagccaagggcagggctctggagtcagactggaagacctctgctccttaccgactctgcaaacccccatgtggctgcttactccatatatgaccatgggctcattcttgagtctatctggatctcccgcagctcaacaatgtcattaccgagcaggctttttctagatttccactctgccatcctcagtgggctgcagctgtagcccaagctggctgtctcatggtcataagatggccaccacaactccagccttcatgtccacattcaaggctagataaaaaggagaaagggaccatagcagacttttcttattcttgtttcttttgtcaggaaagcaaaagcatttctgtagtgcccattagactaaagctcatatctcactggccagaatggccatgcctagctgccaagtagtctctggcttgtttcagtgtccttagaagtaggtggcatggcagagggtgtggatgatggttggggttggccaatcagcagtaagggtggacctgctctccagatttccagtggtactctttcatctttccctcattgttctctcctctcctcttcctttctgggaaaaagatttggggtgtggtggggtgggttgtctgcttttagtaaattttcatccctctagctctgcttccaagacccagcttctttgatgtcctataggcattgagttgagtactggcaagttcaagactacggctgaatgccaagattctgtggttttggaaggttctatggatctgccccacccagccaggcagggggcccacccagagcctgaactgccaggtgaaaccagaatcatggctgagaaggagccatgtatttgtgtgcacatgtctgtctcaccccatggtgcctgaggctctcccagggctgcttgagaactgagtccttgtgtttttcaggtttggggtgatccactcggtgttcaccaacctgcttctgtgggccaatggcgtcctcaatgagtcaaagcaccaactcaatgagcacaaggaacggctcatcactctgggttttgggaacataacaacaggtgagtggtgagagaggtgagtggcccttctgccatgttggaatgtcttgggaacctgcagagtccacagagttcagagatggagtgcaggttccaaagaactgcagggccacccaactcagcatcagccagacagcccgctgttgttgaaaatcttccaaaacctgaatctttcataagtgatgtgtactgagcataaataaaggtttcttccatgactcagggacttgtaagacccacggtgattattctgatggccatttctcatggtccagtttgcggcagaaataaatgtctttgttttcaactacagaagattgatggttgcctctgcttgtgtttttaattaaacctctattaccagttctttctagtaaaagtatggcttttaaaaattcataggagtctaatggtaggttgtggttaatgggctgtagttcatttaaagttttaatttaactgtattggcttataattctagctcatgtctgttccaccttgttcctatttgaaagcctgttgggttaatctttatattttcatctaaaatcctttagcatttacaatatgtcacttctatatgagaacattcaggctgaggggaatgtggggcagggaactgggtgtctcaggtttgttcccatcatgtacaagctgtgtgacctttagaagacatttaatctctctgagcctctcttttctcatttgtaaagtgagggtatccaaatcatgcacttgcaaagatcccttccggctttaacatgcagcaagtctgtggcagttttgtaaacccaggctgtcctggagagccactttgaacctgtttcatcatcagtggggtggagacaacgaagtcaccacccccaaccagcagccactcttggtgtttgggcctcatgtcctccttggtatcaatctctctggtaggctatatatgtgtgtgtgtatgtgtgtgtgtgtgtgtgtgtgtgtgtgtgtgtgtgtgtgtatatatatttatttatttattctattttatttattttttttgagacagagtctcactctgttgcctaagctggagtacagtggcgtgacctcgactcactgcaacctctgcctcccaggttcaagtgattctcctgcctcagcttcttgagtagctgggactacaggtgcgtgccaccacacctggctaatttttatatttttagtagagacggggtttcactatgttggccaagctggtctcgaactcttggccttgtgatccacctgccttggcctcccaaagtgttgggattacaggcatgagccactgcgcctggcctcaggtagacaatattaacctcattatatggatgaagccatcaagccacggagaagttagcccagggtaacacagtgaacacgtgatcgagccatgatttgaatcctaacaatctggcttcaaggccctctgtgaaagatgaggttggattaattttctaaaaaaggactctgtcagctgtaacattctgttactctgaacttttcctcctgctttcttccctggtcttctgcataacaccgtattgaattgtaagtgctagggaagccctgcctgaattgaagattattatcgggggcagtgactcatgcctgtaatctgagcactttgtaatcccgaggctggagcattgcttcagcctaggaatttgagaccagcctgggcaacaaagggagaccccagctctgaaaaaaaaaaaaaaaaaaaggcaggcatgctggcatgggcttgtggtcccagctatagctacatgggagactgacgcaggaggatcacttgagcccaagaagtcaaggctgcagtgagcggtgtttgtgccactgcactccagcctgggcaacagagggagaccctatataaaaaagaaaaaaaaaaaagaaaaagaaaatttcatagtgttctgtgacagtaaaattaatgctacgatatagtttttctcagattttttttttttttttagacggagtctcgctcgtcgcccaggctggagtgcagtggcatggtctcggatcactgcaagctctgcctcccgggagtcacactattctcctgcatcagcctcccgagtagctgggactacaggcacctgccaccacgcccggctaattttttgtatttttagtagagccaggatggtctcagtctcctgaccttgtgatccgcccgcctcggccttccaaagtgctgggatgacaggcgtgagccaccacgcccagctgcttttctcagattttataagtaatatatacatatcataaactaaaactatgacaaagtgtgaagcaaaaaaatccactacacttacccagaaatgcggtcaatgctgtgaacgtttggttatttttttgtcgtgtgccatttacttatagttgattttatactatatatgtgatgtttgtttatttcaaccttcgacaagagacagattttacattgtgatccaaacacgcatgtacctatgtgtgtatgcttgatgaaataatacttagttttactatatcagagacgcttccaaattttattgtagttgactccactccattctgtcctattctagtccactgaaaattatttctgctacagaaaagttggttgctacctgattttacagcctggtactgggtcgtgacttgcattaaaaaatagatacacagtttgttcttacttttttccattttcccttgaaaacgagattactttcttaatattaaaacacatcctggccgggtgcggtggctcatgcttttaatcccagaactttgggaggcggaggcaggcggatctcatgagctcaggagttcaagaccagcctagccaatgtggcggaaccctgtctctacaaaaaatgtaaaaattagccgggtgtggtggcacgggcctgtggtcccagctactcagcaggctgaagtaggaggatgcttgagcacagaagtctgaggttgcagtgagccaagattttgccacagcactccaacctgggcaacagaaggaggctctgtctcaaaacaaacaaaacacaaaacaaaaaaacccccaaaatacccaaaaccataaatcacatcttaattataatgtgcagtggctgtttagtatctcattgttgtgatacactaaaatttacttaacaatttctaaattgttggacattgagctgttcctctctctctctctctctctctctctctctctctctctcacacacacacacacacaattttacctgagttttttttaaattatattttgagactgagtctcgctctgtcgcctaggctggagtgcagtggcacgatctcagctcactgcaacctctgcctcctaggttcaagtgattctcctgcctcagcctcccaagcagctggtattacaggcttgccaccacacctggctaatttttgtagttttaatagagacgaggtttcgccatgttggccaggctggtctcgaactcctgacctcaagtgatccacctgctttggcctcccaaagtgctgggattacagggctgagtcaccgctcctggccttacctgactctttgattacatttttttatttgtccctttgagtagaagggtagaatggaaagaacagaattatgggtcagagactgcatcgcctttagggctttggtgacctgtttcatcatttacttacagcatctgccctcctgtgatgagaaggccctccataccgcagccagcttctcttccagaaggtggtacccgtttactttccccgcaccgatatcggacggcgcctgtctcctgcatgcctgcttgcactggagtcttaagaggcacatcttttgctaattaaaaggggcattttctccagaaagtattttttcaaaataatgttgaaaaatcacacatgtaaatcatcttcacagagaaaacttagaaaatacagggaagcaaaatctagaagagatcaaaaatcatctgtcattttttcacccagagataaccattgttgacattttagtttgtgtccttccagattttttccgtctgtctgtgtgtgtgtgtatccatctatctatctatcatctacatatctattttttacaacaatagagtcatcttctctatcctctttggcaactcaccaaatgaatgtgatttaggtaatgaatatgctttggggatactcagggctatcaacttagccatgatattaaacgtgataataagctatgacatgataaagctcataatccagtgggaagacccaagcctgaatccacggtggaaacagttttctgtgcttttctgttcccccttgcacctgctaatcgccctcctgtgtgatctacctgtctcccctagttttagatgaccacacaccgcagtgtaactgcacgcccccaactctgtgcactgccatctcccacgggatctactacctctaccccttcaacatagagtatcagatcctggcctccacaatgctctacgtcctgtggaagaacatcgggcgcaaagttgacagccatcagcaccagaagatgcagttcaagtctgaaggggtcatggtgggcgcagtcctgggcctgaccgtgctggccgccaccattgctgtggtggtggtatacctgattcatatggggcgctccaagaccaagagcgagtcggcactcatcatgttctacctgtatgccatcaccctgctgatgcttatgggggctgcggggctggctggaatccggatttacaggatagacgagaagtcactggatgagtccaaaaatccggcccgcaaactggactcggacctcttggtgggcactgcctcgggctcctggcttatctcctggggctcaatcttggccatcctctgtgctgagggccacccccgctacacctggtacaacctgccctactccatcctggcgatcgtggagaagtacatccagaacctcttcatctttgaatccattcaccgagagcctgaaaaactctctgaggacatccaaacccttcgggtggtcacagtctgcaatggcaacaccatgccccttgcttcttcctgccccaagagtggaggtgtggccagagatgtggctccccagggcaaggacatgccaccagcagccaatggaaatgtgtgcatgagagaaagccatgacaaggaggaggagaagcaggaggagagcagctggggagggagcccaagcccagtccgccttccccgtttcttacagggcaacgccaagagaaaagtcctgaggaatattgcagccttcttgttcctctgcaatatttcggtaatctgcaccaagttattcttattcttttaattttactttaaactttcattttcggttcaaggggtacacatgcagatttgttaaatgggtaaattgcgtgttgctgaggtttggtgcacaaatgatcccatcacccaggtaatgagcatagtgcccgataggtagtttttcaccctgcaccccgcttccggcctctccccctagtagtccctggtagtgtctgttcatatatttgtgttcatgagtacccaatgttaagctcccacttataagagaggacatgtggtatttggttttctgttcgtgtgttaattcacttaggataaggcctccagttctatccaggttgctgcaaatagtgtgatttcattcttttttaaggctgcataatattccacggtgtagagctacacattttctatttatttattttttgagacaggatcgcgccctgttgcccaggctggagtgcagtggcatgatcacagctcactgcagcttcgacctcctgggctcaagcaatcctcccatctcagcctcctgagtacctgggaccacaggcatgtgccaccacacctggctaatttaaaaaactctctttttttgagacagagtttcactcttgttgcctaggctacagtgcaatggtgcgatcttggctcactgcaacctctgcctcccgagttgaagtgattctcctgcctcagcctccagagtagctgggattacaggcacctgccaccacacttggctaatttttgaaaatatttttagtagagatgggggtttcaccatgttggccaggctggtttcgaactcctgacctcaagtgatccacctaccttggcctcccaaaatgctaggattacaggtgtgagctcccacgcctggccaaaactttttttttgtagagataggttctcactgtgctgcccaggcttgtcttgaactcctgggctcaaacaatcctcctgcctcagcctcccaaagtgctgggattacagatgtgaaccactgtaccgtccataatacattttctttatccagtccattattgatggacatctaggtttctcttgcctttttaaaataaggaatggaggcagcttgtaataaaaatactgtaagtacaaaattacaatataaggctggaaaatagacctgtattctacaaatctacctactgaagacttgctgtgtgctaggggctgggcagggtactaaagattaaagtggaaagactcagtctctttcctctaaaaggtttcagtataatgggggagggagacaatgagaaaatctaatacagtgagcaggacaagtgctgagatgggtttgtgcaaggtgtactaggagcagggatccagaaggacttcagtgagtagtgggtgcttgacgtgaggcccactgtcaatcaggagtgcttttggttgcaagtgataggcaatttgattcgcagtgtcttcagtcttaacaatgtttaattatctcatgagaatcccagaggttggctgcttggggttggcctggcagctgaaccgtgtcaccaggcatccaggcactgttcatcttgtcacttgggtggtgtggtgcttgttgccgcatggtcatgagatggctgcagctgcaccaggcatcacatctgggttcaagacagaaagcagtggggaagggctggtgccaggcagtgtctctcacatgggcacccctcactgcaagggaggctggggaagtggatggtttgctttccagcctctctgatggaaggtggcaagggagaggaaggtgtacagtcactcacctatctgtccgcatcagcaaggaatgactggaagttcaccaggttatcaaggcagggagaagcatttcaggcagaggtacacaatatgtgaagacacagaggcaaaagacaccatggcatgttttgggagcaccaagtagtttggcataaattccacatgtgttaagcagagtagcagaatgggaaataggagagagggcccagctaggtggactctggcttgagcagggcttcctaggcctggctagagtctagtctttatgttgagggcaagggaggactctcgcagatttgtgttttggaatgatcctcccagtagctgtgtgtagcaaggatggagacagatagggccagaagcagaaagactgggagagaaagccctgcaacagagcaggcaggaaggggaggagcttgaaccagggcagtgatggagggatggagagaagaaaaaggaataagaagcattgtgtgcagttgggatttttttaaagacacataaaggaaggatggtgggggttggtgaggaaggggaagcagcctttgccaccgcatgagtctctgcagtgatggtgactggtggctggaggggagtgcctcagtccacagaggtgcctgcccatcactctgggtgaagtcagctctctgctaccagcctccgttatgaagcctgctctctgttgccctagcagctcagaggcttttgagtttcctcccctgaatttcagatggtgcatacagggcctgcagcttttgatatcaccctaagaacgcaaagttgggaaggtcccttctgaaatcagaatggctgtgtgtctgccaagcaaacctggtccactctaaccttggatcacccggcttccttcagtttgctaggcagtgaggaggggcgctgaaggcggaaggcccagaagagtttggctgcaggcagaccctcttctccatctaacagacatttgccaggaaactgctgtatgccaggggctatgtcaggggcacagcagtgaaccaagaattgaaagagttaacaagagagatagatactattcggctgcatttttttgaggtgcatgttccaaaacacaaattcttatagtcagagctagttctagaatcttcctcaagcatatgctttttgtacatatcctgtgattaatattaatatacatatattttgagatggagtcttgctctgttgcccaggctgtagtgcaatggcatgatcttggctcattgcaacctccgcctcccaggttcaagtgattctcctgcctcagcatcccgaggaggtgggactacaggcatgcaaccaccatgcccagctaatttttctatttttagtagagacagggtttcactaggttggtcagggtggtctcgaactcctaacctcaggtgagctgcctgcctaggcctcccaaagtgctgggattacaggtgtgagccaccgctcctggcctaatatattttttaaaactaagttctgaaaagttgtttttccctggttgcctttttggttgaccactgggtgaaatacttggcttgaatttttggacccacttgaagaaagatagcactgtccgaaataccagaatcaagtggcaactgatggtctgtcaggacccgaaagccagacccagggcccagtccaaggagaagggtgggcttcatctcttcctccctgtgcttggtctatgatgcccccaggcactggttgggttctgggggattgaagcagaggatggaaatcattgcagggtggagtcttaggatacccgtgctggctcatggggtggcactttgaaacctgtggttgaccccaggtggtgccaaaggcatctggcagagagcaagagctgtcttctccagcatcgggagccagtccagaggccccagctgcaggtgctgatgtgcatgtccaggtggggtgggctccacttcagagacggacatggaaatgttagttgaatttccaggagctgtggcactggagacaacagagggtgggtgtggtgacggggaagggcagggtgctgtgggagatgggtcagggaagtcctcttctaaggaatggtgtagatggggctgggatgagagactattagggcagagctgcaggtgtggggaagggatggatgcaaggcaaggcagggctcactggatatgacctgggagcacagagcagagggcagaggggagaccacacagggcctgcgagccaagactctatcctaaacgcaagagaaaaccatggaagggtctacactgagagtgacgggatctgacacatgcttattttattatatttttaattgtggcaaaaaacacatcacataaactttcccattgcacccactttcaagtgtgtagtgaagtaaagtacattcacattgtgcaaacatcacaccatccatttccaggttattctcatctggcaaaactgaaaccctgccctcattaaatatgaactccccattctccccagcccctgacaaccacagttctttcagtgtctaggaatttgactcctagactcctcatataagtgaatttgtggagtattagtccttttgtgactgggttatttcactcatcataacaccctccagggtctccaggttgcaactcacgaagggtgacaggtgccaagtgtgacccctgccttcacacttgagttcctggggagatggtgatactatgttggagacggaggaccctggaggaggggcaaccttgggagcagtgggtggaggtcagtgtggaaggaaggaccagagttaagtaatggacgtgttctgtttcaggtgcctctgtggcatccaaatggacgaacccagtaggcagatattttggttttctattgccatgcaatgaactaccccaaatgtatgacaaaagcaacatgcatgactgtttttgtctcacgggatttattgtgactcatggctttgtgggttagaaattctggcagggcttggataggcagttctgttcctcacagcatcaggtgaagttggtgaagccttgggcagaagttccgtggtctggtgccttgggtgggggtggctgggaggctgggctcagccgggactcttgactgaggcacccacaggtgggtctccagcatgacgtctcagggtggtcggactccgtacttggtggttcagggccccagagccaaccctccaaaagattgaactggaagctgcctgtctcctaaggcctgggcttggaaactgcatggtgtcatttctgccatattttattagtcatgtagtcacagagtccatctagattcaaggaaagagttcataggccacttctcaataggataagtaacaagaatttatagccaactgaacagcagacataaagatgtggatttcagaaaagaggtcccattttcctgccttcctttcttctcatttttcctccctgtctccctctcccttcctctctcccttcttttagaaggtgttccttgagtacctacagaggttcagggactgctatgcatgttgagggtacagcaatgaccaagatctctggtcttcctcttatggggcttacaaaccaggcaacagcaggcaaaaccatcagctgagcaagaaagacaccttatagtgtacctgtgttaagcagagaagtggaaaaggaggatgtgggaaatagctcttgggcagccattgtagatcagagggaccagcttagtgggaaggcctcgctgaagggtgaggtgagacaaggaggggctggccacgcatgttcagggcagagggaacaatggctggtataaaacccccggtgggagtgagcggttctggtttgagaaacaggaagaagggctgcgtgccatgtgggtggggtgagtagggagaagcgtgggtggttagaaatcagctaacagagcgctttatcaccccatgcgggagtgtagattttactttaaatattttgggaagactttgggggtttgatcaaggtagggacaggatctgatttccatgaaatgtaaatctggtggccgagtggagccctagtgcgagctgggagaccaggcaggggaccacccgccatggtccaggtgagaaagtctggatggacaggtggagagagagagccacaggtgggctgaagatactgctttggaggcacagagtggagatgcgctgatggactggatgggagggggcatggttatgaaagtaggagggagataaggatgacacctggagcctcgatggaccacctgggaggacgacgtagctgagcagatagagaaatggggaaggtgggttgagtttgaggtgtgttttagacactcaagttgccaccggaaactatgagcctggggttcttggatgtggtccaggctggagattgagtctgggaagtcataggcctatagctggcatttacaaccagggactgggagagagccccagggctcatgtgtagagagaatagaaagggacccaggaaagatccctggacgctggccaacattaagaggcacagcaaaggatgaaatggcaaaggagactgggagggacccgccaaacaggtaggagagcccctaagggtcacagcagccagtaagcaaagtaaaagagaggggtcttggttccagggtccccgtggtggataccaaatgcacagatgctcaagtcctctatataaaatggggtaatatttgcatgtaacctacccatcctcccatacactttaagacatctctagattacttagaatacctaatacaatttaaatgctatgtaaatagttgttatactgtattgtttagagaataatgacaagaagaaagtttgtacatattcagtacagacacaaccaaccattttattttttgaatttatttatttttattttttgagacagagcctcactgtttgcccaggctggagtgcagtggcatgatcttggcttactgcaagcttcgcctcccgggttcaagggattctcctgcctcagccccctgagtagctgggattacaggcacatgccgccatacctggctaattttttgtatttttagtagagatggggtttcaccatgttggccaggctggtcttgaactcctgacctcaggtgatccacctgccttggcctcccaaagttctgggattataggtgtgagccactgtgcccagcctactttttgaatacttttgatctgtgcttggttcaatccacagccgcaggtccctggatacagaggtcggctgtatataccagggagtgttctgtatgggatactaatgaaggctatgtgtctcagttacttattgctatggaagagaccaccccaatactcagcaacttaaaacaaagtacatttatgatttcatagtttctctgacttatgaatccaactacagttttagctgagagtctctgcacagggccattcccaggctgaaactgttggctggggctgcattcatttcaaggcttgactttgcgagaggtggcagaggatttgtttccaaatctactcatgtgactgttggcaggattcagctgtggcttgttggactgagggtctgagttccttgctggctgttgacgggagtactccctgggccccttgccgcatagggtgcttcacagcatggcagctctgccacctgtcttacaggagaagatgagcaagagggatagcaggtccttttgcaacctaatttcagaagtgacttcctgtgtcttttgccaaattttgtgagttggaagtgagtcgttaggtgcatcccacactcaaggggtggggactccacaagggggtgactgcaggagctggggatcagtgagggtcatcctagaggctgcctgccacagccagggagtggaggaagctgaagaaggctacagccggaagcgggagtgaggagcctgacaactcaagaggtggcacagggggagagaactgggacacaaaagagtctgagaagcagggaacagtgtgtaggttccgtgaacaacacaaacaaaagtcattgctttcagttttgcaaacttaattctcatctaagccctctcagacacgtgttagaattcccatctttcaaatgaggaaaccgaggctgggcgagggctgtagggatggaaagagttggatgggttcagaaagtgctcattcaggatggattgcagggaagggtggttgaggaagtgagcaggatcatggcagacatggatttggtggtttctgtggagatgggaaatgccatgaggtctccttattgttctgtcaggggtgactcagtccctgtgcattaggttcagctcccatgaggcctgggacttgagtggggcctccgtggtggcttggaagctgctccccaccacatgccattttctcttctcttgcagctttggatacctcccgcctttggctgtcgacctgagtatgacaatggattggaggagattgtctttggctttgaaccctggataattgtggtcaacctggccatgcctttttctattttctatcgaatgcacgcagctgcctccctctttgaggtctattgtaagatatagtctgggtccacaagagacctaggagtgagctaacaagagttcattggagccaactaggagtggccaggttgggcaaatattgcctgacaaatatgagaagggccaccttttgtctgcaaagattgtgcttcctgtgggctggaactgcccatcacccctgatgaatgtaaacaagttagatcaaaatccatgaggtggct

SEQ ID NO: 1998 - protein, 448 aa, Homo sapiens
MRGNSATSLSSVGLGLDSAIWTRKNERRKGSCVHYEFGVIHSVFTNLLLWANGVLNESKHQLNEHKERLITLGFGNITTVLDDHTPQCNCTPPTLCTAISHGIYYLYPFNIEYQILASTMLYVLWKNIGRKVDSHQHQKMQFKSEGVMVGAVLGLTVLAATIAVVVVYLIHMGRSKTKSESALIMFYLYAITLLMLMGAAGLAGIRIYRIDEKSLDESKNPARKLDSDLLVGTASGSWLISWGSILAILCAEGHPRYTWYNLPYSILAIVEKYIQNLFIFESIHREPEKLSEDIQTLRVVTVCNGNTMPLASSCPKSGGVARDVAPQGKDMPPAANGNVCMRESHDKEEEKQEESSWGGSPSPVRLPRFLQGNAKRKVLRNIAAFLFLCNISLWIPPAFGCRPEYDNGLEEIVFGFEPWIIVVNLAMPFSIFYRMHAAASLFEVYCKI

SEQ ID NO: 1999 - DNA, 1498 bp, Homo sapiens
  source (1)..(1498)
  CDS (201)..(1298)
  modified_base (278)..(377): a, t, c, g, unknown or other
aggcttctaaggagctgctatttttatttttcctttttaggaaatgggacccaagggtagttcctgaggtgtataagacaggatttcggggtgataagacagaaatccaaggtcacaggaatgcaaggagtccttactgtggtgagacaggggagttgagatgcatgtgtggtccataaacaagctccacaattcagtttatgagagtctcggaaagtgcgggctttgcagttaagaggagtaagataattaaaggtggtcgagtattgatctcttannnnnnnnnnnnnnnnnnnnnnnnnnnnnnnnnnnnnnnnnnnnnnnnnnnnnnnnnnnnnnnnnnnnnnnnnnnnnnnnnnnnnnnnnnnnnnnnnnnntactctctttctctctcttcgtcttgttccgcgcgtttgttgtctgcctttcgtctgtctcctctctctgccgtctcatcgtttgttggctctggtgtgttggggttcgtcgtctggctgtctcctgctcctcctcgtttagttctgtcttgtgtctcttggtgttgccttttgtttttgcgtgtgcttgttgtgtccgttctccgttccgtgttctgtttctgtgtctttttcctttgtgtgttgtgtttgtgtgtgtgtgtttgtgtctttttcttcttgtgcgctcttttgcttgtgtttgttgtccttgtgtttgcggtctctgtctttcgttgtctcgtgttctcttgttgcttgtgtcccggcggtggatcggtgtattgtgtggtctatttactgtttcgttgttcgttgtcttctggtggtggctttttgtctcgttgtgttgtctgctgttgttttgtgttgtctttgtcttgtggtggtggttgttgggctctggtctgtgcctgtgtctgtctgttctgggcttcggtttggtctgttgtgtcgtctggtctttttgtttgtgtctttgtgttctgggtgcgctctttgccttttgctctttgcttggttcttttttgtcgtgttacccacccacccccactcccctacccacccactccccccctttggtcctctggcgttcccctgtaccggggcacacaaagtctgcgtgtccaatgggcctctctttccagtgatggccgactaggccatcttttgatacatatgcagctagagtcaagagctcaggggtactggttagttcataatgttgttccacctatagggttgaagatccctttagctccttgggtactttctctagctccaagatggcttttaagcccaagatggaggaaggctggttgattatttcccccttgtcgtaagtgtccctgtcaaatctttgatgggagggagtgagtcaaaatttgtaatgcatcaaaagatgcatggccaatttgcaagctgtatctgtttggttagcacagcagaattaaagaagagccattgtacctggcatttactgtggagcgatggccacttagtcttgtagtaatcacttgtaa

SEQ ID NO: 2000 - protein, 365 aa, Homo sapiens
  MOD_RES (26)..(59): Variable amino acid
MRVSESAGFAVKRSKIIKGGRVLISXXXXXXXXXXXXXXXXXXXXXXXXXXXXXXXXXXYSLSLSSSCSARLLSAFRLSPLSAVSSFVGSGVLGFVVWLSPAPPRLVLSCVSWCCLLFLRVLVVSVLRSVFCFCVFFLCVLCLCVCVCVFFFLCALLLVFVVLVFAVSVFRCLVFSCCLCPGGGSVYCVVYLLFRCSLSSGGGFLSRCVVCCCFVLSLSCGGGCWALVCACVCLFWASVWSVVSSGLFVCVFVFWVRSLPFALCLVLFCRVTHPPPLPYPPTPPLWSSGVPLYRGTQSLRVQWASLSSDGRLGHLLIHMQLESRAQGYWLVHNVVPPIGLKIPLAPWVLSLAPRWLLSPRWRKAG

SEQ ID NO: 2001 - DNA, 1228 bp, Homo sapiens
  source (1)..(1228)
  CDS (201)..(1028)
tctccaaaaacataaactaataacttatttaatatattagtcttcaaattatgtagaaaagaaatgtggactacaaagcatggttataacaatactagcttttagattaataattttaatgtattagcctctttaatcatgtagaaaacaaaaattggagccacacagcattattacactaatagattttatatttacccatgtatttatctttaccgagatcttcatttcttaaaatggctttcagttactttctagtatcctttcagttcaacttacaggactcccttaaacatttcttgaatggtaggtctagcgggaacaaattgcttcagcttttgcttatctgggaatgtttcaatttctgtcttaatttctccctcattttaaaggacagtttgttagaaatagaattattgatggacagtttgtcttttttttctttgaatatattagccaactgcctactggcctccaaagtttctaatgacaaatgtacagataattttattgaagatcttttgtatgtgatgtgtcacttctctgttgttgttttcaaaaatctgtctttggctttcaacagttttagttcatcctgcttggaattggtttatcttttaaaatgtttaaatttatatatttcatcaaatttgggaagttcatcgacccaatcattacttatatcaatttttttgtccctttcaccttcttctgggactcccatattgtatatgttggttcacttgatatcctacatgtctctcttgttctttccattcttcttcaatcctttttctttctgtttgtctgacttgataatttccattgttttaccttcaaggttcactgattctttcttctgcctagtcaaatttgccttgaatcccctccctagtgaattaatcacttcgattattatactttttagcttcagattttcttttttgtttctctttagattttctgtctctgtattggttatttctatttgttcatatatcattttcttgactttcttcatgtgttaatttttgagcaacattaagacaattgctttaacgtgtttgtttagtaggtatgccatcagttgtttctcagggatagttttgattgttttacttttttgccttaaataggcccaatttacctcttgcatgccttgtaattttttgttgaaaactggatagttgaatataataatatgcaggttctggaaatcagattctca

SEQ ID NO: 2002 - protein, 275 aa, Homo sapiens [sequence omitted]

SEQ ID NO: 2003 - DNA, 23229 bp, Homo sapiens
  source (1)..(23229)
  CDS (201)..(652)
  CDS (755)..(1381)
  CDS (1571)..(1903)
  CDS (2393)..(3213)
  CDS (10896)..(11033)
  CDS (12051)..(12138)
  CDS (14686)..(14770)
  CDS (16609)..(16715)
  CDS (21240)..(21575)
  CDS (21894)..(22056)
  CDS (22883)..(23029)
tattgtttgatggataaaagttcaccttttattgtataaaattgactgagattaatttatacacattgacaatgggtaaatagaatttttcagattattaaaagctgaaggatgcccacgtaagcaaaaaaaaaaaagaaaaaaccaacaaaaataaacccaaacccctcaaacaatttcgaacacgaaacattcttctgatgccggcatccctgcttgcaggtgtgaagggggcaggaatcagcgaggtgtcctgggctgagtccccggagtgggaagaggtggcaggaaggggatctgaggaggagaacaggggtcctggtggtctgtgcttcttcccagacacgggagctgtacaggagacctctgcagcagatgctaggggggccagtaggcccaggcagtcttgggacttgggtctgtcctgctgtgcatccatagtgggtgctttagaaacgggaggcccacccgaagcccctgttgcaagtgaggacaaagtgtgggaaggccgtgagggtctgcagtccgagatggccttgtcctcaacgtgcagtgcagtgttgatgtggggcctagaggcctgggatctgggggagccacccctgggggcaagtgtctgccctggtgctgtacctgccttgttttcacagcggtgacccgaagagacagcctgaggtccgtcctcactcactgtgtttgaggaactgtgggccagctggcagtgggatgaggctggccccctcctccgctttagttcctggaggccttccgtagagctgtgggagctggagctggcatttcgtttgaggcaggatctggtccgggaggtctgggatctctggttatatctcacttctgacctctgggcacgtgctgcagctgtggctgaggccaagaaatgtgaggggcctccatccactgcattgagtagcgaccccgacgtggggttcaatgtggaggggggaagggctgctgcggcagctgcaggagccgaggtgccaggccttgttcttctcatgccggcatccctgcttgcagctgtgaaggtggcaggaatcagcgaggtgacctgggctgagtcccgggagtgggaagagttggcaggaaggggatctgaggaggagaacaggggtcctggtggtctgtgcttcttcccagacacgggagctgtagaggggacctctgcagcagatgctaggggggccactaggcccaggcagtcttgggacttgggtctgtcctgctgtgcgtccatagtgggtgctttagaaacgggaggcccacccgaagcccctgttgcaagtgaggacaaagtgtgggaaggccgtgagggtctgcagtccgagatggccttgtcctcaacgtacagtgcactgttgatgtggggcctagaggcctgggatctgggggagcctcccctgggggcgagtgtctgccctggtgctgtacctgccttgttttcacagcggtgacccgaagagacagcctgaggtccgtcctcactcactgtgtttgaggaactgtgggccagctggcagtgggatgaggctggccccctcctccgctttagttcctggaggccttccgtagagctgtgggagctggagctggagctggcatttcgtttgaggcaggatctggtccgggaggtctgggatctctggttatatctcacttctgacctctgggcacgtgctgcagctgtggctgaggccaagaaatgtgaggggcctccatccactgcattgagtagtgaccccgacgtgttgttcaatgtggaggggggaggggctgctgtggcagctgcaggagccgaccttgttcttctcatgccggcatccctgcttgcagctgtgaaggtggcaggaatcagcgaggtgacctgtgctgtgtcccgggagtggtaagaggtggcaggaaggggatctgaggaggagaacaggggtcctggtggtctgtgcttcttcccagacacgggagctgtacaggggacctctgcagcagatgctaggggggccagtaggcccagggagtcttgggacttgggtctgtcctgctgtgcatccatagtgggtgctttagaaacgggaggcccacccgaagcccctgttgcaagtgaggacaaagtgtgggaaggccgtgagggtctgcagtccgagatggccttgtcctcaacgtgcagtgcagtgttgatgtggggcctagaggcctgggatctgggggagccacccctgggggcaagtgtctgccctggtgctgtacctgccttgttttcacagcggtgacccgaagagacagcctgaggtccgtcctcactcactgtgtttgaggaactgagggccagctggcagtgggatgaggctggccccctcctccgctttacttcctggaggccttccgtagagctgtgggagctggagctggcatttcgtttgaggcaggatctggtccgggaggtctgggatctctggttatatctcacttctgacctctgggcacgtgctgcagctgtggctgaggccaagaaatgtgaggggcctccatccactgcattgagtagtgaccccgacgtggggttcaatgtggaggggggaggggctgctgcggcagctgcaggagccgaccttgttcttctcatgccggcatccctgcttgcagctgtgaagggggcaggaatcatcgaggtgacctgggctgagtcccgggagtgggaagagttggcaggaaggggatctgaggaggagaacaggggtcctggtggtctgtgcttcttcccagacacgggagctgtagcggggacctctgcagcagatgctaggggggccactaggcccaggcagtcttgggacttgggtctgtcctgctgtgcatccatagtgggtgctttagaaacgggaggcccacccgaagcccctgttgcaagtgaggacaaagtgtgggaaggccgtgagggtctgcagtccgggatggccttgtcctcaacgtgcagtgcactgttgatgcgctggaatgccgtctctttttccaggtgcaggtcttcagccgtgacccggtaccccagctctaagggaggtggcagcatcaaaggctcccctcgcctgcgtggcagcaggggaatcttgcgtctacggggcctagagtcctgggatctgggggagccacccgttggggcgattgtctgccctggtgctgtatctgcccccttttcacaccgtgtgtgacccgaagagacagcctgaggcctgtcctcactcactgtctttgagtaactgagggtcagctggcagcgggatgaggctggccccctcctctgctttagccccggcaagcctcccgtggagctgtaggagctggagatggcatttcgtttggtgctcgagctcgtccaggatgtctgggatgtgtggttatatctgatttctgagctctgggcgtggaggtctgtctgcagaggcccgggcctgggcacaaagggagaggggcctccattgtcccgcaggggccaaaatgcagaccgtgcatccccggtgacctcggggaccgttctctgatcatcaggattttcttggactctggggtccttgtcctgctcaggcatccctgccccgctctccttgagggccctcaacactatcttccctggacacaagtctggggacagccgggtgttgtggaccccaaaggggtgactacctgctcctgggccccacagagtccttgtgctcagtgtagtggctgagctgggggatgccctggaactcggagcacacagcactggcttactgtggtacctgtgcagtgaaattgaagacagaatcaccaggatggaacacaggtcttgcaggatcacggaaaaccttcttagagttgtcttgacaccactgatgtcgagtgtgcgggtgtttgtaggatggcctgccactcagtccaggggcaggagcaacggggagatcccacaagcaaagtgaactgggggatgggctgaaggggctccaggcaactgagccctactcgcaggtcctcggccttggcccaaacaggaatgaggggcacagagtgcccgggtaaccgctcctgggagcagtggggaactgtcggatacttgaactctcaagagctgggctctgagcgtcctcatccagctgccaacttggccaaaggctaagccagcagattgttctgttgccgggcaacgcgacttctaaacctgagggagtgggcatgtgagcacataatggcaccagtgacagagcgaccataatggatgaataagcacagccaggtacccgcgcaaggcacctgctggcaatggcaggaggcggacgtggggggtcgtgcagtaggtactggagggagagacgtgggcacaaaggtcgcgggaggaacaggtgcccacaatggctgcatatttgcccgtggatcactgaagattcctgctctcctgctgaggtggagactgcagtgagctgagatcgcaccattgcactccagcctgggcaacgagtgcaaaactcagtctccagataaaaaaaagaaaaagaaaaaaaagaggccgggtgtggtggcttatgcctatgatcctagcactttgggaggtcggggtggacggatcacgagatcaggagttggaggccagcctggccaacatagtgaaagcccgtctctagtaaaaatacaaaatttagtcagacatggtgggcaggagagagcatgtgcaggggaacatccatttataaaaccatcagacctcatgagacttattcactaccatgagaacagcatgggggaaactgcctccatgattcagttatctccacctggccccacccttgacacatgggaattgttacaattcaagatgagatttgggtgcggacagagccaaaccatataattcttccccggcccctcccaaatctcatgtcctcatatttcaaaagcaatcgtgccttcccctaagtcccccaaactcttatttcagcattaactcaaaattccatagtccaaagtctcatctgagacaaggcaagtcccttccacctatgagcctgtaaaatcaaaagcaagttagttattttctagatacacagggatacaggcattgggtaaatacactcgtttcaaatgggagaaattggccaaagcaaaagagctacaggccccatgcaagtccaaaacccagcaggcaaatcttaaagctccaaaatgacctcctttgactccatgtgtcacatctaggtgatgcaagaagtgggttcccagggtcttgggcagccccgcccctgtggctttgcagggtacagccccccttctggctgcattgagtgtctgcagcttttccaggcacacagtgcaagctgtcagtggatctaccattctggggtctggaggatggtggcccttttctcacagctctgcttggcagtaccccagtggggactctgtgtgggagctccaaccccatatttccctttgacactgccctagcagaggttatccatgagggcccccccctcccctcccccccacagcaaacttttgcctggatttccaggcattttcatacatcttctgaaatgtaggcggaggttcatgaacgttaattcttgactttggtgcatctgcaggcttaacaccacctagaacctgaaaggcttggaacttgcaccctctgaagccatggcctgaggtgtaccttggccccttttacctatggcaggagcagctgggatgcagggccccaagttcctaggctgcacacagcagggggttctggacccacaaaaccatttttccttctaagcctcctggcctgtgatgggagggtctgctgtgagggtctctaacatgccctggagacatttgccccattgtcttggtgattaacatttggctcctcattacttatgcaaatttctacaacccagtctcctgagaaaatagatttttcttttctgttgcatcatcaggctacaaattttctgaacttttatgctctgcttcttctcgaatgctttgctgcttagaaatttcttctgtcagataccttaaatcatctctctcaagttcaaagttccacagatctgtagggaactctagaaagaaattcttattttccctctttcccgcctatcttatgcccgtttctaatacaggtgcacaatgcctgcagtgtctttgcatagtaagagtgactttactccatttcccaacaaattcctcatctccctctgagaccacctccgcctggaccttgttgtccatatcactattaacattttggtcaaagccattcaacaagtctctaggaagttccaaactttcccacattttcctatcctcttctgagccttccaaactgttccagcctctccctgttacccatttccaaagttgcttccacattttcgggtatctttacagcagcaccccactctactggtatcaacttattgtattagtctgttctcacactgcaaataaagacatacctgagactgggtaatttataaaggaaagaggttgaattgactcacagttctgcatggctggggaggcctcacaatcatggtggaaggcaaggaggtgcaaaagcatgtctcacatagtggcaggcaggagagagcatgtgcaggggagctcccatttataaaaccatcagatctcatgagacttagtcactaccgcgagaacagtatggggggaaccatccccatgattcagttatctgcacccggccccacccttgacacgtgggaattattacaatgcaaggtgagatttgggtggggacccatccaaactatgtcagtatgttttgacttcttgcttgattgctaggttgcatagaggacaaacatggaaattaatgaagtaccttaatatctggcttcagatcttagacaggatcagagggccagctcaaatttgcaaggaggggaggtagatcccaccattttatgggtgaatggcaaaatcaaacagaaattatgtgggatgggagatactgatgcagccatcattggaaacattctacttagctaattttatgctaggctttaggtcaagaaggagagagagagctgacatgctgtggtacacacttatagtcccagcgacttggaaagctgaggcaggaggattgcttgatcccaggagtttgaggtagtgtgcgatgatcgttcttgtgaatagccactagccactgaactccagcttgggcaacattgagacaccctgtctcttaatttaaaaaaaaaaaaaaaaaaaaaaaggaggaaagaaagtggtctcagtttttaatgtaaatatttttaatgggatactgatattttaagattaatgtatattgtatatcagttaactgcaggtcaataattatataaaacttaaggtacgaaaaacatttatttttgctaacatatctgtgagttgactgttgttggcttggtgaggctgcaagctgcagatagagtctaggtatgttttctgtgtgtttgttcccccttggatcagtggactacctgagaatgtgtttctgtcacagtgatagaatcacaaggaaactccagttctggaagtacattttaagccattgcttctctcatgtccactaacattcagtcagccaaagcacataccttgtccatggctaacattgatagtatagataaatatacctgatctctagcaggaggaactgcattgtcttggggaaaggttttagatatagggaggggtgatgagttgggaacaataatgtagtctgccgcaaacatattaaagtgtaactggatatggttgctgcagaattttgaacctttgttttaattgtgatttttactctttcccccctatctagtgcccttttgtaatacagtaattatcatgatttttgtctgaactgaaatcttctgagattagattgtctacgaaaatacagtcgatcctccttgttttcagcttttgtatttgtgaactcacctactattttttgtaacccccaaatcagtactcacagcactttcatagtcatgtgtttgcgcagagtgtcaaagaatttgagtttgaacaggatgatattctgccttctttttcagctctcatacaatagtcaggtatcctttttgtggtctatttaatgccatgcttttcctgtttttgtactgtttgttggttgttttgccatttaaattaacccccaagcatagtgctgaagtgctgcttagcattcacaagtccaagaagtctgtgatgtgtcttacagagaaaatacatgcattaaataaactccattcaggcgtgagtgctgtagtgccgttggctgtgagttcaatgttaatgaatgaacaatgtatattatttatttattcttcatttaattaattattattattattttttttgagatagagtctcactctgttgctcaggctggagtgcagtggtgcagtcttggctcactgcaacctctgcctcctgggttcaagcgattcccctgccttcgcctcccaagtagctaagactacaggcatgcgccaccatgcctggctaattttttttttttttttttgtagttttagtagagacggggtttcaccacgttggccaggctggtctcgaactccagacctcaaatgatctgcccgccttggcttcccaaagtgctgggattacaggcgttagccactgtgcctggccaacaatatatattaaataagcacacatacaacaaaagtaggtgttggtaagcttacaaaagtgtgaccagtagcttgctgaaacctaactttttatttgttcatggaactttctagaccgtaactacactgaataatgagaatctgctgtaatctttttaggtgctgtagatgagccattggattaaattattacagtatgtttcagactgctgtatgttgaaccctagtgaaatgcctctcaaaccttcataaggatcacaatctcatgtcctttttttttgttattaaatgcccagtatgtgttagcgatttaaacaaaattcaaatatttttttttttttttttttgagacagagtctcgctctgtcacctaagctggagagtgcagtggtatgatctcggctcactacaacctctgcctcccgggttcaggcgattctcctgcctcagcatcctgagtagctgggattacaggcacccgccaccacgctgggctaatttttgtatttttagtagagacggggtttcgccaggttgtccaggctggtctggaactcctgacctcatgcgatctgcctgccttggcctcctgaagtgctgggattataggcgtgagccaccatgcccggcgttgacttcttaataataaccatactgactggtgtgagatggtatgccattgtggttttgatttgcatttctctaatgatcagtgatattgagctttttctcatatgcttgttggccgcatgtgtgtcttcttttgaagtgtctgtttatgtcctgtgcccactttctaatgagatttttttttttcttgtaaatttgtttaagttccttatcagtgttggacattagatctttgtcacatgcattgttgcaaaaattttctcccattctgtaggttgtctgttcactctgttgatagtttcttttgctgtgcagaagcttcaagaagaaaggaatccgattggttctgtgtctgtctcttttggtattctcagaattatgtagtcattcatatagaaagatgattaggaaaataggacaagaatagcagaaatctacataaaaatgtaggaaattaaaattagttaccagcatacaaaaaacttctgtatgttataattacatactataactcacccctccttggcaaatattctctctcttttgacttcaaaatcatggcttatatgtactttctctatttcccagatgcaaatataattaattgactttatttatctaggaaatgttactcatatcttaattgtagtcattggcttgagtgacgggttttggtaattcaactactattacttgaaagtagtagatttcataggatactgttataaaatctttttaacctcttttctgatttcaggagtaattagtaattgtggtttactggaaaattcaatgaatagggtgttaaaggaagcaattcattaataatatatgtaatctattgggagactgaggcgggtggatcacctgagttcaggagttcgagaccagcctggccaacatggcaaaactccgtctctactgaaaatagaaaaattcgccgggcatggtggtgcattcctgtattcccaggtactcggaaggctgaggcaggagaatcacctgaactccagaggtggaggttgcagcgagtcaggatcgcagcactacactccagcctgggtgacagtgagactccatctcaaaaaaaaaaaaaaaaaaaaaaaaaaaaaattaaaaaattaaattaaaagcgggctgggcgcattggttcagggccgggcacggtggctcaagcctgtaatcccagcactttgggaggccgaggcaggcggatcacgaggtcaggagatcaagaccatcctggctaatgtggtgaaaccccgtctctactaacaatacaaaaattagctggatgtggtggcaggtgcctgtaatcccagctattccagaggctgaggcaggagaatcacttgaacctgggaggcagaggtttcagtgagtccagatcatgccactgcactccagcctgggtgacagagcgagattctatctcaaaaaaaaaaaaaaaaaaagcaacagaagcaaatgagagtgcctgggagtggtcattgtggggccttcccgtttgtgtgacccaggtcatgtccctccctaagccctggtctctcttgcctcctgcagggctggtgaattaccagatctccgtcaagtgcagtaaccagttcaagttggaagtgtgtcttttgaatgcagaaaacaaagtcgtggacaaccaggctgggacccagggccagctgaaggtgctggtgccaacctctggtggccgtacctgatgcacgaacaccccgcctacctgtactcgtgggaggtaatggtggtttgggacttgcgtaagggaggtcttttgcccccatctggtagccctggcttcagcaggagcccaggacaggtgaacgggcaggtgtggtcctctgagctttctgatgtttcccacccttggtgggaggcccagattttttatttatttatttatttatttatttatttatttatttgtttgtttgtttttgtgatggtctcactctgtcacccaggctggaatgcaatggcctgatcacagctcactgcagctttgagctgcaatcctcctaccttggcctcctgagtagctgggactacaggcacatgccaccatgcctggctaattaaaaaaattttttttgtaggccgggcatggtggctcacacctgtaatcccagcacttcgggaggctgacgcgggcggatcactttaggccaggagttggagaccagcctggccaacatggtgaaaccccgtctctactaaaatatgaaaatttgcagggcatgatggtgcacgtctgtaatcccagctactcgggaggctgaggcaggggaattgcttgaacccaggaggcaggggctgcggtgaattgagatcatgccgcagcactctatcctgggtgacagagtgagactgtctcaaaaaaaaaaaactcctttttatagagttggggtcttactaggttgcccaggctggtcttgaactcctggactcaggtgatcctcctgccttagcctcccaaagtgtagggattccaggcatgagccacctcgtctggtcaaggagaaggcctgattttgaagggcaggtcccagggtcagccagtgaagggcagagcctctggttgctgcttctctgcaggcccagtggcgacttctggggtgcatgcacgaggggtcttcctgctgtagggcaggccagatggggctcaggctgtcggggcgctcacacctggcgctttggctgtcgtaggtgcggctgactgcacagaagtcactggggcctttgacttctacacactccctgtgggcgtccgcactgtgcccgtcaccgagagccagtgggtgagagccagtttcatttgcggtagaggcagcagaggttgtagaaatgctccttgaggcagatgccacaccccaatttcatggagtgatttgggctgagccgagtctgcagcaggcagaaggctctgagatgttgtcctagcctgggcaaaggacaattcagagctcgggggaataggggtgtgctcagcacgactgggtggacaggccgtttgttgtgaatcgtacaggcttccaggagcgggtgcctgaggcttccagacaggctttgggaggtggccagaggagatgcctgtttccggggcaggaaatggagggagggcccaggctggagaggttcagccaggctgtcacaaggctttgaagcttcccatctgagagcctggctattggagagtgtgggtttggaacttgaggctaggaggttctattctgtcctgtgccagccacagccttcggatgggcagagcaatgatggggggaagatgtaaaagaaaagaactgaggaaagaagaagaaaaccagcttcaacaacggtctaggccggatgcggtgggtcacgcctgtaatcccagcagtttgggaggctgaggtgggtggatcacccgaggtcaggagttcgagaccagcctggtcaacaggtagtgaatcctgtctctactaaaaatacaaaaattagctgggcatggtggtggacgtctgtaatcccagctaccaggtaggctgaggcaggagaatcgcctcaggtgaaccaggaggcagagattgcaatgagctgagataatgccactgcattccagcctgggctacagactgagactctgtatctcaacaaaacaaaacaacacaaaaacacaacagtctgttctgtggaggccttgggcagatgctcggcgctctgagcacggactggtccctctgttgggagcctcttcccttcatccctcctggttaacttgactcagcataaaggccatttcttctaagagcctgtccctgactctccaatcggggatgtgtctgttgtctcatagagtgcccaattcctgccaccacttgtcatttccattcgcaacatttctttcattgtttgtttttcagagtcagggtctcactctgttgcccaggctggagtgcagtggtgcaatcatagctcgttgccatctcgacctcctgggcttaagcgatcctccccactcagcctcccaaatagctgagaccacagacgtgcgctgccttgccaggctaaattttaatatttttttttccccacgagtcagagtcttgctctgtctcccaggctggagagcagtgttgcgatcttggctcactgcatcctctacctcctgggtacaaacagttctcctgcctcaccctcccgagtagctgggattacaggctcacgccaccatgcccagctagttttcttctttattttttgttgagatggggtttcaccatgttggccaggctggtctcgaactcttgagctcgtgatccacctgccttggcctcccaaagtgctcacaggcttgagccaccatgcccggccctaatttttaaatttgttgtagaaacaaggtcttgctatgttgtccaggctggtctcaagcgcctggtctcaagtaagcctcccaaagtgctggggttctaggcttgagccacctcgcctggcacttgcaccgtttttctgtgcatgcatctccactcccactgcccaggacctgtggacttagatttgagtcattactgagcacctagcacccagcctcatgcctccctcccacctcgcactacctgtttgcttgatgcattaataaatattccacctgaatccacagcccattcactcctgtgttcaagagctatttcaggaagtgaacctcatttctggcagtgttcagtccagtgacctcagctctgtgtacccggcagggtggctacgcctctgggggagttggattcaggggtgggggagaaagagtgttgttagagagctcggtctaggactagaggaacgtgcccttatgtaaaatacatctcaagttagggaagaaagcagcggctctgtgctttgttgtttttttttttttttcttttctttctttctttttttttgtttgtttgtttgtttgtttgtttgtttgtttgtttgttttggggcagggtcttgctctgtggcccaggctggagtgcagtagcgtgatttcggctcactgcaacctccacctcccgggttcaagcaattcttgtgcctcagcctcccgagtagctggagttacagatgcgtgccactaagcctggctaatttttgtatatttagtagaaatggggttttgccatgttggccaggctgttcttgaacccctgacctcagtgatctgcctgcctcagcctcctgaagtgctgggattacaggcgtgagccatcgtgcctggcccccagttgtgttctggcaggggaagatgggacagagaggatgggaggttgtctgagcctttcccggactgacggaacctgtgtcttctctcttttgtggacaggatggtgattgctcacaccaaagccttggacccctcccagcctgtgacctttgggaccaactccacctacgcagcagacaaggcggtgagcctgggggtccccaccccatttctccctgcctttgcctgggcttgtcctgaagcctgctcatgggaacagctggaaagaaccatgtgctgccagtctgagctttttattttgttttacttagaaagatagagacagggtcttgccatgttgcccaggctggtctcgaactcctgggctcaagtgatcctcctgcctcggccttccaaagggctggggttacaggcgtgtgccaccgcactcagccgcggccagtctgttttcaaagatggtctttgggttaatgacaattctctctctgcttactctccaggcagtgtggctttctgaatccaaggaggctgggcatagggagatgggatttgtttgcccggtttggactcagcattttttgtactcgatttaatagactcataaaatgtcaaaggtttaagtgagcttagagttcatctggcccaaacctggctgatcagaatctccaggggaagttttattgaaatgccagatctctgcgttctgagatcctgatttagtaactccagggttggaacctgagttttttgtttttttgtgtgtgtgtgtgaaggcaaggtcttactctgttgctctggctggagtgcagtggtgtgatcacagctcactgcagccttgaattcctgggcctaagcaaccctcttgcctcagccttccaagtagctgggactccgggggtacaccactgtgcccggctaattttaaatgtttttgtagagatgggatctcactatgttgcccaggccagtctcaaactcttgagctcaagtgatcctcctgccttagcctcctaaagtgctgggattacaggcatgagccaccgtgcctggctgatactagcattcttttttattttttattatttttttaagatagagtcttgctctgttgcccaggctggagtgcagtggcacagtctcagctcagtgcaacctccgcctcccaggttcaagcaattctcctgcctcagcctcccaagtagctgggataacaggcacatgccaccacgcctgcgcttgatcgtgggaggcagaggttgcattattgtgccactccattctagcctgggcaacagagcgagactctgtcttccaaacaaagcggaaaaagattatctgcgagaatgactgcattggccccttgggtgggagggcttctccagggcaaggtgaggggatgcccagtgctgggagtgctgcctggagaggagtcagttccagtggcgggggccctgggttttggctgaggactgcgtgttggcagctgctctgcctctcacagcccttcccagctgcacacgtcgtgagcgtcagtgtgcaatcacaggcctgcctcctttgggccactttgtgaccatgttttttgcttgtggggcagggtaatttcaggatctaaattggtgcagttggatgttctcagccccgagaggcagctcttcccgttgtaggctttttgttttgttttgtagaaatggagtcctacgacgttgcccaggctggtctcaaactcctgggctcaagtgatcctcccaccttggcctcccaatgtgctgggattacaggcatgagccactgtgccgtgctgattttcttgatactattttttgtagagctggggtcttgctgtgttgcccaggctggtctcgaactcctggccacaagccaccctcctgcctcagcctcccagagtgctgggattacatccccttcttaccttctctgtcagaggagcccccacagcatgtgagtactgagtcatgcggtcttgtggttgctgaacgggctctgctgctctggtcctaggctctgtatgtggatgtgatccgtgtgaacagctactactcttggtatcgcaactacgggcacctggagttgattcggctgcagctggccgcccagtttgagaattggtgtaagacatcacaatcccattattcagagcgcgtatggagtggaaacgcttgtagggtttcaccaggtaagcggtgttgaactttctgcttgtgtattctctctgggcagagatgccacttgcctcccccaccatgccatctctgaagaatattacagaccattttggagcatggtgaataagaaattttcaccttaggagttcagttgaatagtcatttttatatttgtgactgcaagtcactcttaggggctgtacttccttagtactggtagcattattatccaatggacttttatagctttcattaggttttcttttgtttttgttctttaaagaacattttacttatcttagtatttcatttttcatctatattatgaggcagtaagagtcttctgtttttccaaagttgagactgctttatatttatttcatattgtctacagctgtagtgttcaatacattagccactagccacatgtggttatttaaataagataaaataaaaattggccgggcatggtgggtcacgccggtaatcccagcactttgggaggccgaggcgggcagatcattaggtcaggagatcgagaccatccttactaagacggtgaacccccatctctattaaaaatacaaaaaattagccgggcgtggtggcgggcgcctgcagtcccagctactcaggaggctgaggcaggagaatggcgtgaacctgggaggcagagtttgcagtgagccgagatggcgccactgcactccagcctgggggacagagcgagactccatctcaaaaaaaaaaagaaaattaaaaattaagttctttagttgcactagccatatttcaaatacttgatggatacatgtggctagtggctaacataagggatagcacagatataaaacatttgctcgtcatataaagttctattggatagtgctggtctgtagcttataggatggtatcttagtctgcttcagctgctaaaacagaataccataaattaggtagcttaaacagtagatattttgaccaggcgtggtggcttatgcctgtattcctaacactttgggaggccgaggcaggtggataacttgagctcaggagtttgagactagcctgggcagcatggcaaaaccttgtctctacgaaaattagctgggcgtggtggtgcacgcctgtagtctgagctacttgggaggctgaggtgggagaattgcttgaacctgggaggcggaggttgcagtgagccatgatcgcaccactgtactccagcctggatgacagaatgagactctgtctcaaaaaaaacaaaaacaaacaaacaaaaaaaaacagatatttctcacagttctgcagactggaagtgcaagatcaaagtgttggcaaattatgtttcttaaagagggcctgcttcctagattggaaatggccatcttctctcggtatcctcacatggtagggagaaaagcagctctagtgtctcttcttataaaggaagtaatgccaccataggggctctattctcatgacctcatctaaacctaattctctcctaaaggccacgcctcccagtatcctcaccttgggggttagggctttatcatatgaattttttttttttttttttttttttttttgagacagagtctcgctctgtctgtcacccaggctggagtgcagtggcacaatctcggctctctacaagctccgcctcctgggttcacgccattctcctgcgtcagcctcctcagtagctgggactaaggcgcccgccactgcgcccggctaattttttgtagttttagtagagacggggttttaccatgttagccaggatgatctcgatctcctgacctcatgatccacccgcctcggcctcccaaagtgctgggattacaggcatgagccaccgcgccgggcctatcatatgaattttgagggaacacaaacatgcagtctgtagcagatggtaataggctgacatattacacttgttgatgtaaatctgataggtttctttctctccaaggacagctttttaaatatttaacagtatcaataatttttcaggttctgtgagaattttataatttataatttgcagacttaatgtataatctattttgtcctaacaattacaaatatattttttatttcagattgtatatattcctaccagatggagataattacagctttaaaaatttttattttttcattttatttcacacattgacattaaatttttatggacacataataactgtacatatatatggggtagaatgtgatgttttaatacatgtactcaatgtgtaatgatcaaatcagggtaatttgcataatgatttttctgtagggagaaaattcaaaatctactcttctggctattttcaaatatataatatgttattgttaactatactcatcctactatgcaataggacaccagaacttattcctgggttctacatccgttaaggcaaccaaggattggaaatattggaaaaaaaaattgcgtctgtactgaacatgtacagacttttttcttgtccttattccttacacaatatagtacaataactatttgcatgacatttacatcggatattatgagtgatctagagttgatatgaagtatatgggaggatgtgcaaaggtgatgtgcaaatactatgtcattttatatcagggacttgagtatcctttgttaccctcaggagatcctgaaaccagtcccccatggatactgagggctgactgtatagtcctatcctcacggaactttcattctaatgggggaagactgactataaacaaaatgtatgtaataggtggtggtaagtaccgtggagaagtaacaaacggggcaaagtgagttatacagctccattcttagaaaccttggagtacttttcttagtttatactcgtggtggtttccttttgtctcctttattacatgggactctgacatgtgcccatagctagggtgacagtaggatctacccgatagtagggtggcagtaggatctacccaaaaagcatcctgctgatacaggaccaaagcatcctgttgttctcgagcctataaaaagagctaatggtcttgcttctcttaactgtggcctcctacactatgttttggatgattggtgatgtcttggatattctgtttctttggaactttgaatatacaacacttttctagggaattagcaatggaagcagagcaaagatgtacagaggaaacaatgcgtaactctgatggaattgaagtcatgaggcagcagagagcttaaattacagctttaaaaatttttattttttagagggaatttacttgggagtaacagcagtaatagttaacggagccagaatgcttgagtcatataattgcaaagcagagttgggagcaacagatgctaaagagtagttgctgtagttcctctttgggtcgtaggagcagttgtcatattaccatatagctactgcatgaagaagagttcttagtgaggcctggatgaacagctcttcttagtattctgtgtgaccccatttgaccttttaacaaatccctaagtaaataaatagcccctcaggtaaactaagtttttctctgctgtttttttgcttgagagagctataactgtaatagacttatatttctgaacattttagtgcttgccaatatttggtaatatttatgtttcctatatttgtaatgaacattcttcttccggtacattttttgttaaatattgtttgatggataaaagttcaccttttattgtataaaattgactgagattaatttatacacattgacaatgggtaaatagaatttttcagattattaaaagctgaaggatgcccacgtaagcaaaaaaaaaaaaagaaaaaaccaacaaaaataaacccaaacccctcaaacaatttcgaacacgaaacattcttctgatgccggcatccctgcttgcaggtgtgaagggggcaggaatcagcgaggtgtcctgggctgagtccccggagtgggaagaggtggcaggaaggggatctgaggaggagaacaggggtcctggtggtctgtgcttcttcccagacacgggagctgtagaggagacctctgcagcagatgctaggggggccagtaggcccaggcagtcttgggacttgggtctgtcctgctgtgcatccatagtgggtgctttagaaacgggaggcccacccgaagcccctgttgcaagtgaggacaaagtgtgggaaggccgtgaggtctgcagtccgagatggccttgtcctcaacgtgcagtgcagtgttgatgcggggcctagaggcctgggatctgggggagccacccctgggggcaagtgtctgccctggtgctgtacctgccttcttctcacagcgggtgtgacccgaagagacagcctgaggtccgtcctcactcactgtgtttgaggaactgtgggccagctggcagtgggatgaggctggccccctcctccgctttagttgcgggaggccttccgtagagctgtgggagctggagctggcatttccttggaggcaggatctggtccgggaggtctgggatctctggttatatctcacttctgacctctggacacgtgctgcagctgtggctgaggccaagaaatgtgaggggcttccatccactgcattgagtagtgaccccgacgtggggttcaatgtggaggggggaggggctgctgctgcagctgcaggagccgaggtgccaggccttgttcttctcatgccggcatcgctgcttgcagctgtgaagggcgcgggaatcagcgaggtgacctgggctgagtcccgtgagtggtaagaggtggcaggaaggggatctgaggaggagaacaggggtcctggtggtctgtgcttcttcccagacacgggagctgtagaggggacctctgcagcagatgctaggggggccagtaggcccaggcagtcttgggacttgggtctgtgctgctgtgcatccatagtgtgtgctttagaaacgggaggcccacccgaagcccctgttgcaagtgaggacaaagtgtgggaaggctgtgagggtctgcagtccgggatggccttgtcctcaacgtgcagtgcactgttgatgcgctggaatgccgtctctttttccaggtgcaggtcttcagccgtgacccggtaccccagctctaagggaggtggcagcatcaaaggctcccctcgcctgcgtggcagcaggggaatcttgcgtctacggggcctagaatcctgggatctgggggagccacccgttggggcgattgtctgccctggtgatgtatctgcccccttttcacaccgtgtgtgacccgaagagacagcctgaggcctgtcctcactcactgtctttgagtaactgagggtcagctggcagcgggatgaggctggccccctcctctgctttagccccggcaagcctcccgtggagctgtaggagctggagatggcatttcgtttggtgttcgagctcgtccaggatgtctgggatgtgtggttatatctgatttctgagctctgggcgtggaggtctgtctgcagaggcccgggcctgggcacaaagggagaggggcctccattgtcccgcaggggccaaaatgcagaccgtgcatccccggtgacctcggggaccgttctctgatcatcaggattttcttggactctggggtccttgtcctgctcaggcatccctgccctgctctccttgagggccctcaacactatcttccctggacacaagtctggggacagccgggtgttgtggaccccaaaggggtgactacctgctcctgggccccacagagtccttgtgctcagtgtagtggctgggctgggggatgccctggaactcggagcacacagcactggcttactgtggtacctgtgcagtgaaattgaagacagaatcaccaggatggaacacaggtcttgcaggatcacggaaaaccttcttagagttgtcttgacaccactgatgtcgagtgtgcgggtgtttgtaggatggcctgccactcagtccaggggcaggagcaacggggagatcccacaagcaaagtgaactgggggatgggctgaaggggctccaggcaactgagccctactcgcaggtcctcggccttggcccaaacaggaatgaggggcacagagcggagatataccgctcctgggagcagtggggaactgtcggatacttgaactctcaagagctgggctctgagcgtcctcgtccagctgccaacttggccaaaggctaagccagcagattgttctgttgccgggcaacgcgacttctaaacctgagggagtgggcatgtgagcacataatggcaccagtgacagagcgaccataatggatgaataagcgcagccaggtacccgcgcaaggcacctgctggcaatggcaggaggcggacgtggggggccgtgcagtaggtactggagggagagacgtggg

SEQ ID NO: 2004 - protein, 1098 aa, Homo sapiens [sequence omitted]

SEQ ID NO: 2005 - DNA, 23098 bp, Homo sapiens
  source (1)..(23098)
  CDS (201)..(492)
  CDS (16941)..(17357)
  CDS (17484)..(17704)
  CDS (18987)..(19125)
  CDS (19248)..(19456)
  CDS (20424)..(20664)
  CDS (22756)..(22898)
tactgggagaaccactgctctcttcaaagctgtcagacagggacatttaagtctgcagaggttactgctgtctttttgtttgtctgtgccctgcccccagaggtggcgcctacagaggcaggcaggcctccttgagttgtggtgggttccacccagttcgagcttccctgctgccttgtttacctaagcaagcctgggcaatggtgggcgcccctcccccagcctcgctgctgccttgcagtttgatctcagactgctgtgctagcaatcagcgagactccgtgggtgtaggaccctccgagccaggtgtgggatataatctcgtgatgcgccgttttttaagcccatcggaaaagcgcagtatttgggtgggagtgacccgattttccaggtgctgtccagcacccctttccttgactaggaaagggaactccctgactccttgcgcttcccgagtgaggcaatgcctcgccctgcttcggctcacgcacggtgagtgcacccactgacctgcgcccactgtctggcactccctagtgaaatgaacctggtacctcagatggaaatgcagaaatcacccgtcttctgcgtcgctcacgctgggagctgtagacctgagctgttcctattcggccatcttggttcctcccccaaaatgaaacttttttattgctctgtaagggcttacactatctctctctctctctctctctgtctctctctctctctctctcacacacacacacacacacacacacacacacacactctgttatatacattgcaaatatttttgccagtctgtctaaattcatatgtccatctgtccatccatgcatttatccacccacccatccatctccataaagctctgaatttccctttgtgatttctacttttggcatcatgcttaaaaaaaaattttttttctacccccttattttataaatatccactaaaattgttcctagtgtcttcatgggtttttttttagtcaatttaaatgttttaaacttctagaccaagtgtgatggctcacgccagtaatctcagcactttggcaggccgaggtgggtggatcacttgaggtcaggagttcaagatcagcctggccaacatggtgaaaccctgtctctactaaaaattcaaaaattggctgggtttggtggcatgtgcctgtaatgccagctacttgggaggctgaggcaggagaatcacttgaacccaagaggtggaggttgcagtaaaccgagatcacaccactgcactcaggtctgggcaacagagtgaggccctttctcaaaaaataaataagtaaataaataaataaataaataaataaataaataaatgttttaaacatgtagactttattttgcatggggctcagctctgactctattggcttctacatagatgacctgttagtctaccatttcctaaagactctgtccttctttaatgtacttaaatttgagctattttaaaacttttttttttgttttttacccagcactatgggatgccaaggtgggtggatcacgaggtcaggagatcaagaccatcctggctaacactgtgaaaccccatctctactaaaaaaaatacaaaaaattagccgggcgtggtggcgggcgcctgtagtgccagctactcgggagactgaggcaggagaatggcatgaacccaggaggtggagcttgcagcgagccgagatcatgccactgcaccccagcctgggcgacagagcgagactctgtctcaaaaaaaaaatgacttttttttaaaaaatagagatgatgtcttgtggttttgcccaggctggtcttgaattcctggcctcaaatgaccctactgcctcggcctcccaaagtgttgggattacaggtgtgagctgctgcacccggccaattgatcaatttttatatacaagtttttcttcttttggcagtccgcaaaaattcagaaagctactataagaaaatgacaatcaaccatctgtgtacaaaaagaattagccacttaacacaactggtcctttttccattgtaaaaatccataggaaattggatttgtaattatgtttcggctttccatggaaaccacagagcagccggtcatctatatattcagcaaatccttcaaattgcagaggtgttttttttttttttgagacagagtctcactctgttgcctatgctggaatgcagtggcatgatcttgctcaccacaacctctgcctaccagggtcaagtgattctcgtgcctcagcctcctagtagctgggactacaggcatgcaccaccatacccggctaatttttgtatttttagtagagatggggtttcactatattggccaggctggtcttgaactcctgacctcgagatccacccacctcagcctccccaagtgctgggattacaagtgtgagccaccatacccagcctgcagagatttttttttagggatgggaagatcacagaaatgcatcaaagcacatattgtccaaataagaagaagtgaaaaggtaaaaatataggctatcccataaaatttcaagaataagctgtgcttttgtgcttcaggctattttgatagcaagcattctcaacactacatattttttagtttttttgagacggagtcttgctctgtcgcccaggctggagtgcagtggcacgatctcagctcactgcaacctctgcctcctgggttcaagcgattctcccacctcagtgatagcgatagaaaaattggattacaaaatgcttggaacaaaggagaagaatgacacatttcttctgtgcagttgcattaaatataaagaaacatacatttatctccctagttaatttataaaagttggtaaaatggctgggcatggtggctcatgcctgtaatcccttagtagctgggattgcaagtgcctgccaccacacccagctaatttttgtgtttttagcagaggcggtgtttcaacatgttggccaggctggtctcaaactcctgacctcaagtgatctgcatctcttggcctccaaaattgctgggattatagctatgagccaccgcaccagaccccagtgttgactttttagagacatatctatgaaggcatttgcagctttgtaatggtttgaacttggacttttggccaccgtattagtggcacctcagtggtgactaatgcagattttaaaatttagggtccctgaggaagatgatgggaaacaaaacctttcacctggctctccctgctgtggcatgctaatatggatgagtaggtcttgcagtgcagataatgatttttacaaattcatcgtggaaagtgacagaattctttcgagtggggagagaccttaagcaaggggaggtaagcagacctttttcaaatgtgccaggtgatgccaggtgccttgcaggtcctgtgccaggcactggcatgacattctttgtttctgaaacagaatctccctctgttgcccaggctggagtgcagtggcgctatctgggctcactgcaacatccacctcccgggttcaagtgattctcctgcctcagcctcctgagtagctggaattacaggcacccgccaccacatttggcagatttttgtatttttaatagagacggggtttcaccatactggccaggctggtctcgaactcaagacctcaagtgatccacccacctcagcctcccaaaatgctgggattacgggcgaggtatggcattctttcatttcacttatgaaaatactaaggcccgagtatttaaacctcctgccctgctggaggttacataattcatggagtggggaatcaaacccaggtctttacaatgttgccacccagcttcttcccatcactactcatgctttgctgggtgccctggatgcagccgtgcctgaaggccactccacaaacaggccctgctgggagacagtatcagagatccaggactctgggaagtagaactgggcaagaaagtgcaaggggctgacaaatgggctggctctccatcctgcctggcatctggtctgatcctgttgtagtactagtgaggtgggtgctgtggccgagggaggggctttgtggggccacacctggggacagatgggaccagagtcagggtctctgaactgtgtgcatcatccactgtccctgacttttcactagagatgtctacaaacatcacagagcagcagtctaggaacaggggctccctgccagtgctgctgtgagcccttggagaattctgcacttccaaaatctcttatctgatggccttgggaagctatctcaagatgccacagctggccggatgtggtggctcatgcctgtaatcccagcacttctggaggctgaggcgggcggatcacctgaggtcaggagttcaagaccagcttggccaacatgacagtatttttactgtctctagtaaaaatacaaaaattagcctggtatggtggcatgcacctcccacccacctgggaggttgagatgggaggattgcttgagccgggcagtgcaggttgcagtgagtggagattgcgccactgccttccagcctgggtgacagagcaagaccctgtctcaaaattaaataagtaaaattagaaaaaaaaaataaacaactggtatacttggttgtagctgcagggattatcagttaccctctgtccataacccttaagtgaaagccttgtctaggggccactgatcttggtggacctggcaggggagcagtacactccaggtgtcttagtagggccattcctaaagtcctaaagatggcattgggcagtacaagggacttctgcacagcacacacacaccaggtctgcatcttctctgcaggacgtgcagcgttttatgctgtagccccagagatttcagtctctgcttttacgaaggcatcccctggagattatgtgagtacttcaacaagtgcaaccaatttccctccatatccaaagtgtgggttgtggagaattcacgtgtgcagcactccctggtttcctgggggaagttgccactgatggtgtatttattttccttgggaaagccaagaagaatgaaccccaaactcaccgactcaccagacacaatgtccgccacaggtgggacatcagtgctggggcttacctgggatgtcaatcaatcttttgtagacattcaagaaagctgcttcagcttccttgcttcttttaataacgtgtcaatctgaaagggaaggaaagaaaggaaagaaagaaaagaaaacaaagagctcaatatttgtcaagaggtaatttacaaagcattacacatctagtgaagtcccgcagcaaggggaagtctgattcctccgcgtagatgcttgacaactgggcttcaacctcttagaggaaatgcctgcaaaccacaaaaaggcccctttcatgaaggtaaaagaggcaggagcagagatttgggaatatggagccattcactatacagcagggaacactgggtgggtcttccatagagaatggtctggcgtgcgtgcccttcgtggtctttttctttctgcaagtactaagagctggccatgtgctagacactgctggggggccgggggtgggcggaagagacagttcctacccccaggagctcagggtctagtagggaaacaggtacgtaattaagaagtaattaaatccctggggacatggagaagggaacctcaggcaggaaaatcgtgaccttggagcagagtcttaaaaagtatttcaccccagtggatgggtaagacaccgcatgtaaatggaagaacatactcaaacgcccggagcaaagaatttcataaaattccttttttttttttttaagacagttttgcactgtctcccaggctgaggggcagtggcgcgatctcggctccaaactctgcctcccgagttcaagagattctcctgcctcagcctcatgagtagtggaattacaggtgcccaccaccatgcccggctaatttttgtatttttagtataaatgaggtttcattatgttggccaggctggtctcaaactgctgacctcaggtgatccacccgccgcagcctcccaaagtgctgggattacaggcctaaaccactgcgcctgacctatgtgttctcttttgagatactcattcacatgtcagcttgtgctccattcctggagtccagattaagagcccaccaatggggctacaacacaccatgggggataggggacccacgagagtctgccgggtgggaacgtggatacatatgcaggatctgtgggtgacgcagttgggcaagcaaatggggtcagatcgtgaggggcacaagagcaagtggtgcagggtgaccgtcatcacctgggcagcagtcggggagaaaagagcacagggggcggcaaggaggaagagatcactctggagtcattgctctcatccaagggagacatgctgggcagtggctgtgggtgttgaggaggacgagagggcggctggagagatcagtggcacacacagttgatgtgaggcccagaagaacaaggcgaatcgaggacgatgcccaggattccagattaggtaactggtgaggttttgcgatcgtggccaggattggtttgttttgtgaactgactagctgagccagtttcctccagcgtagacgtctattcttcagctgtgccggacgcacatgcaaagagcctgccgtggttggaccgacttattagaatatttagcttacctacacacttgctgagacaacagatcacgctttacagccaaaacacacaagactgcacgtgcaccaatttcatactggctcaggcaaaggacagtaaattatatattccttctgtcccttcctagaactatgctgtctctgatgttattaaagaggcaaaaagatgtggtttaattacagggcctttcagctgagccacctggcagtttgttaagggctgagagaggtcccctgattaaggatgtggggttctcaggactaggggatgagggctagtgggagctgggcctagaaaatcaaatgcatagcagactagtgtaatgcaagcatttccaacttctaacaagctgtgcactaagattccaatttgaaagtcagttgtttggaactcagacacattcgcccccccaccgccccctgccccccgccccccaacctgataagttaaggctgtgattctaggccagttgtggtggctcacacctgtaatcacagcactttgggagggtgagatgggaggatggcttgagctgaggagttcaagaccagcctgggaaaaataatgaggtatctacaaattaaaatttaacaataaaaattttacagaataaaaaataaaaaaattagctgggtggggtggcaatgcacctataataccagctacttgggaggctgaagtgggaggattgcctgagcctaggagttcgaggctgcagtgagctgtattcacacaactgcactccagcctggggaacacagtgagaccctgtctcaaattaaaaaaaaaaaaacaaaacacacacacacacacacacaaaatgttgtgaatttggtgttgagtagagtttcagaacactctacaaggactgttttttgagatagaggcttgctttgttgcctaggttggagtgcagtggcacagtctcagctcactgcagcctctgcctcctgggttcaagcaattctcctgcctcagcttcccaagtggctgagactataggagtgcgccaccatgcccagctaattatttgttttgtatttttagtggagatagggtttcatcatgttggccaggctagtctggtcttgaactcctgacctcaggtgatccacccgcctcagcctgccaaagtgctgggattacaggcatgagccaccatgccttgcctgcaaggactattaatatgacatgaccgccctttgtttttaaaataactccctccccctttattagcaattcatactcattgtgtgatcagaaaaatatcaaatatatagaaaaaaattaaaagtataattacagtgtgccactcacaggcaggaatcagactgtgaggtctgtatttctaagtttgttttcctaattatacaaaaaaatatcattgcggccaggtgcagtggtttatgcctgtaatcccagcactttgggaggccaacgtggacagatcacaaggtcaggagttcgagaccagcctggctaagatggtgaaacctcatctctactaaaaatacaaaaattagttgggtgtggtggcatgcacctgtaatcccagctactcaggaagctgaggcagaatcgcttgaacccgggaggcggaggttgcagtgagctgagataatgccactacactctagcctaggcaacagagtgagactccgtctcaaaaaaaaaaataaatcagtgacatgaaatgcagacacacaagagactgatgtattatacattagagtggtctcgggctgggggtgggcaggaaggaggggctggtagatgccaactgaagggtgtgggatttccttttgggtgatgaaaatgttttacaattgtctggggtgacagctgtacaactttgtgaatatcctaaaagtcaatgaactgcagattttaaatgggtgaattatatggtatgtgaattgtatctcaatcaagctgcttaaaacgggtgtgtgtatgtacatattcgaaatcaacctatacataagattgtgcagtgtgctttctttacctgtcgtatcatgtatctttctcaatatccattacaaattttgggaactgtctaaatggtactgtttcaactgtacctaagcccacatattatagatgtctgcagtaagcaacggatttggagttgcttctccagacgaattggaacactccctggggcccttctaagagaggcaggtgggtagcagagcctgtccagaaagctgggcagatgccctggctgctgtccgtactgattgacagccacacagaggcttctcttcctggcttaggatctgcctagggagggcccttcacttcccaggtattccgactgagggtactaggtggctgcatctcctggaggcaagggctgggatctggaaggatcctgaactctgtcctcctgtcaactatgttattcccagggatgtggggtttggtaatttacatggcacacttcggggctgtaacaggttgaattgtgtctcccgaaagatgatgaagtcctgaccctcaatacctgtgaagatgaccttatttggaactagggtctctgtaggtgatcaagataaggcaaggtcattagcctgggccctcgtccaataggatccgataagaaggagaaacgtggacacagagacagacacatagacaggatgtcacagggagacaaaggaaaggctgggctgatgatctacaagacaaagatgaccaggaaaccaccagaagctgggacagggacacagtagattctcccctacagccagcagaaggaaccagccccgtggacatcggtgttttaaaaccactctgctgagctgggcatggtagctcacacctgtaatcccagcactttgggaggccgaggtgggtggatcacctgaggtcaggagatctagaccagactggcctacatggtgaaatgctgtctccaccaaaaatacaaaaattagccaggcgtggtggtgggagcctgtaatactagctacttgggaggctgaggcaggagaattgcttgaacccaggaggcagaggttgcactgagctgagatcatgccgctgcattccagcctggcgacagagcaagactccatcccccacacacaaaaaaattaattaattaattaaaaaaaaccactccaagcatgtcgttttgtctaaactagcataaaaaccaaaaaccctagtgttcctccacccattggagctgtatcacagggaccacgactttcagacctctccccatgccctcttccactaacacagggaaattccagcccagtcctgaggaacatggtcaggtcgatgggtttaattaattcagtatgcaaatgggccatgaggtttcttaaaagagatgacttaaaagatccttttctaaatgatgaagtcccctcagccccacagacaagaatgggccccaaggctgggcgcagtggctcatgcttgtaatcccaacaatttaggaaacggaggcaggaattcaagaccagcctgggcagcagagtgagactctatctctaccaaaaataaaaattagttggccgggcgcggtggctcaagcctgtaatcccagcactttgggaagccgaggcgggtggatcacgaggtcaggagatcgagaccatcctggctaacacggtgaaaccccatctttactaaaaatacaaaaaaattagccaggcgtggtggcaagcgcctgtagtcctagctattcaggaggctgaggcaggagaatggcatgaacccgggaggcagagcttgcagtgagccgagatcgcgccactgcactccagcctgggcgacagagcgagactccgtctcaaaaaacaaaaacaaaaattagccaggcatggtggtgtgcacctgtaatcccagcactttgggaaactgaggtgggaggaggacttgagcccaggaattgaagaccagcttgggcagcatagcgagaccctatctctacaaaaaaatacaaattagccagccacagcggtgcacacctgtagtcccagctactcggaggctgaggtgggaggggctcaaggctgaagtgaactatgattgagccactgcactccagcctggaagaccaaacgagactgtggtttttttaaaaaaacaaaacaaaacaaaacaaaaaaaacagaatgaccctggaggtggagttcagtccatcctccctctgcagctcacccagtctgtggtgggctttcccttcctgtgacttcactgctgcagcctagttccgtgttccgtgctttgcttacttggaacacccttggctggcctctccactcaaaacctatctattctgcaagacccgatgcacacaccacttcccccagacctcgagctgggttcctgggctgttctgagtctgaagggagggagggagccaggcctttgaatgccagccccacctcatctgcatgaggaggagacagcagccacctcctggggctggacgagtcgctgacctacgctggcgagggccccagtaccagatacaacacagtgactctgccacacagaacagcttccctccaggtgtccacacggctactggccaggaagagcacccgtgggagggagggaggaagggacagtgttgtgctcatcttcatggcccgcacccacccacctccctgcagggagcccagcccgtccactgcatgccttggaggtgcaagccaaggcttggtaacacagctccctctgagaaggggagggatctgcgaatgagcaagtgtctagggcgaggtcttaatgcaaggattgctgaagagaggatcccaggctagggttccggctccctcatgcctgcgtgcacgttagcttgaggtaggtaccatgcccttaaaaccatttagggccgggcacagttgttcatgcctgtaatcccagcacttcgggaggccaaggtgggaggattgcttgagcccaggagttcaagaccaacctgggcagcatagcaaaaccccatttcacaccgctctcacacagacacaaaaccatttagaagaagctaaactgggacggatctagaaacgtcagacactggcctgtggccctgggtaaaacctgtcctgctctgagggatagcctatttttcaggctcacctcctgccacacccagtcactcccagttcccggaacacatgagcaatttcccctctgcctgtaaggcgcctcccaggaatgctaccctgatcccagggctcagagcagatccatctcccagtcgtggccactcccaacacaatgtgggactgtcctggagttctaggatgacagataaggctgcctgactcagggatcctgaattcctggaaaactaagctgtagcatcaaccgcctttcctcctgaccatgggcacacagtgggtgtttaatatgcttttaatattttcctcaatggccaactgcatggtttgcagatgtgacccaagggttcaggaatccaggtttaaatctttatgaaaatgctcaatatgtaaagagttcttgactgggtgtggtggctcacgcctgtaatcccagcactttgggaggccaaggtgggtggatcacttgaggtcaggagttcaagaccagtctggccaacatggtgaaccctcgtctctactaaaaatacaaaaattagccgggtggggtggcaggcacctgtaataccagcttctcagaaggctgaggcatgagaatcgcttgaacctgggaggtggaggttgcagtgaaccgagatcacaccactgcactccagcctgggcaacagagtgagactccgtctcaaaaaatatataaataaataaataaatagaaaatgcttaacatgtaaagagttctctgtgtagtaagcattgttttgtgtgctgtgagacaatgacagccatttggctggcagtagctcctgggaggtgtgtttctccactgtacacacacaatggtgctctccagccgttttcctgcagtgacccacacatccacactaatgactgctgctggattccatggttatcttttcagcaacatcaatttcataaggttgagtttttctttttaaatgtaataagtgttacatttaaagacaaatgtgtaggcacagtggctcacacctataatcccaacactttgggagaccaaggcaggatcacttgaggcaaggagttcgagaccagcctggccttcgtggcaaaaccctgtctctactaaaaatacaaaaattagccaggcgaggtggcccttgcctgtgatcccagctacttgggaggctgaggcaggagaatcacttgaacccaggaggcaaaggttgcagtaagccgagattgtgccactgcaccccagcctgagcgagagtaacatacagtaaaaataaagactaaacaaccaatatcttgagagctgagggatttttgtgtgtttgttttgaagcttgtttatttttgacaggagtgggaagaggggaagatcatataagtaaaaagggcactaagtttgaaatcagaagactggattaaggcatggctctatcatgcattttggctcaggctgggagtggtggctcacacccgcaatcccggcactttgggaaactgaggcaggaggactgcttgaggccaacagtttgagaccagcctgggcaacatagagagaacacttcattttttgtggatgaatatctttttttttttttttttttttttttggagacggagtctaattttgttgcccaggctggagtgtagtggcgtgatcccagctcacttcaacctccgcctcctgggttcacgtgatcctcctgcctcagcttcctgagtagctgggattacaggggctcatcaccatgaccagctaatttttgcatgttggccaggctggcctcaaactcctgacctcaggtgatcctcccacctcagcctcccaaagtgcagggagccacctcttccaaagagctgggagctcacatgcgtgagccattgtgcttggccaacctcttgtaagctttcaataggattgtgtgcaaatgcctataattaggtctagcactcaatgggcacagaacatgctatgactgttccaaggcatactgcacgcacagtgtcaagtccaaaacctcactagagcatggtctattcaccaccactgttgctcaccaagctcacggtaaaaaggataatagtaatttgtgcactgggctgcagcaggctttggggacctgcgtgggggtggggggtgcaccaggagactagctgtccagtgggtgcctccccatgtgctgcacaacagggtacctggcatgccaggtgggaggcacagagggagacaaggatgtggactgcacaagggccccagatcaccaaggtgtgaatcggaaagactggacttcagatcatctgtgggggtggtaaccgaggcttaagaagtgctgtgtattttttgtttctgagatggattttcactcttgtcatccaggctgaagtgcagtggcatgatctcagctcactgcagcctccgcctcccaggttcaagcaattctcatgcctcagcctcctgagtagctgagattacaggcacatgctagcacatccgcctaatttttggatttttagtagagacagggtttcgccatgttgctgaggctggtcttgaactcctgacctcaagtgatctgccggccttggcctaccgaagcgctgggattacaggcgtaagccactgcacctggccaagaagtgctgtgtattttgaaataagaaaggctcatctctccagtgtaccatgcccatgtggtaggcaagtccatgccacacacagccaagagcctgggtatgtttttggcagaccagggtttgatttccagctccagcataaaacaggtactctgcctgggccgttcaatcaacctctctgggcctcagttttttcatctgcaaagtggggcgatacatcttggttgctgtcaagatcaaagccgtggtgaccgttggaaaacagcgaaggagtcgctgcctcaccagctccacttctcagacgcagaaacccatcaagccacttggaacctggcccctggcccttcctagtgatatgataaaatccagcattgtgcactggggctgggggccacatggttgatggaaagaatatgtgctttgatggaaagacagacttatgtttgaatcttagttccagcacacactggctgggtgactgggaggcaggttatttaaatactgaagcatttggctgggcacagtggctaacacctgtaaataccagtactttgggaggccaaggcagacagatcacctgaggtcaggagttcgagaccagcctggtcaacatggtgaaattctgtctctactgaaaatacaaacattagccaggcatggtggcacatgcctgtaattccagctacttcagagggttaggcaggagaatggtgtgaacccaggaggcggaggttgcagtgagctgagatcacaccactgcactccagcctgggtgacagagcaagactctgtcacaaaaaaaaaaaaaaatatatatatatatatatatatatatatatatatatactgaagccttggtctcttcgtctattaagtgagggtagtaactccctccttgttaagctgttgtgattataaacatgagaacctcctacatcaagtatctgacacagtctggatagaaaccaaatcaacatcacaaaccttcactaataaatccaaagtcagcacctttctttccaccacaccataggttattctctgtcgtgatcaaaccaagcaggaagccaagatgtggaaagtcctggaggaccaggacacttaagcaacatttaagatgctgctggctcttctttacatgagagatctcccccagccccccattcttccttctgtgcctggacctgcccggggtcagtgctgcccaggcaggaagcggaagcccaggtcaagacccacgtgggcctggctcgtttctctcctggggggcgttctgcaaccctctgcctggtgctgaggtcgaccagatgccccggagcttccagactcccatctgggaggtcctggttcctgtcgctggccggtagattttgtggtgtggctgagcgaaagtgggtgcagaattgtgtcggcacactgatgtcgcgtggtttatagagccaagggccccgcagagaagacgtgctcagagccctgcccaccctcacggggtggcccaccatggccctgacccaccctgcctcacactgggcagtggctcatggccatacgaagaaaaatcccacagcctgcccaccccaaggccctccctcccagcctcgtgaccctaatcgcggcttccagcacctcaaacatgaccactagctcacagcaggccccgcccaggaacacccgtccccaggctgcactcccggccctgtcctgcagacctccgcgtcaaaggcccccaacgggacaggggtcctctaactgccccccacctctgcgcgccctctgttccattcctttttgccccctgcctgaatcacgcacaatcttgttgcatccatcctcttcccaccctgcgcccgtgtgtcattgtggccctactgcgtcctcagagcaggagggtgcagcgacacggcaggcactgggtaaatgccccatggtgggggtgtgtgagcggcgtcggggtgcggccgctgtgaggggcagctcctcttgtggctggggcggagctgaggacactcggagttggggtgggagagacgggactcaggacttagagggagcggaagggggcggggctgggaagggaggtagggcggggagctgggggagcgggtgggacggggctgtgtggggccaagctgagtcggggggtgggatgcagctgggcgtggctgagtgggggcggagctgagtggggggcgggatgcagctggaccactcattgtaggaattgctggaaggggctggtggagcaggtctggttgtgggagttgggtggtggcagtgggcagggccggcggtgatggaggagcctgtgggttggggcagggccggtggtggagggcggggccggcggggaggggtctgtgtgtgggcggggctggggcggggcggagcggggctggggcggggcggagcggggctggggcggggcagggcggtgcagggagctgggcggattaggcccccggcccactgtgcacgctccccaggcactgcgggcgtgatgatctctctgagccgcatcctcacggagctactgctgcccgacgagcgcgccagcatgctcatcttcttcctggtgtcggtggcgctggagctgctgtgcttcctgctgcacctgttagtgcggtgcagtggcttcgtgctcttctataccacacggccgcgcgacagccgccggggcaggccaggcctgggcaggggctctggctaccgcgtgcaccacgacgtcgtcgccggggacgtccacttcgtaagtgcgcaccgcccacctccgttccctcctctgtccccaccgcgacgtagggaagtacctggggcccagcccctgccctgcatcccaggctgcggcctcctgctgtggtggagaatccttcccgccagcaccctttattctgtcgactcaggtgtgggttcttagtggcaccccacgtctcgtggcctaaggccccactccacccgcatctgtggtccggagatctgcccagctgctgtgtcccacggtgtggggcgtgcatggtccctgtccgcagtgacaccccacatgatgtacactaaagtttccatccctgggacagcccacgttcgttctgagggtctcagccctcctggctgcgccaacccacgttggagagtcctcctgcaggctcagcctggcagcaaactctctaggaagctcacactcttcctccctagagacgggacgccaggagggaagtcagggctcagggataaccctgggttccctgagggggtgtggcggggcccccagaatttcccacagaagtcaccagccaggaaagggagtggtctcccaggtggggatagacaggcggagagggagggccaggggcttggttctgtggcccctggctctgctgggcttccctgtcacagcacagaggcactgcccctacggggtccccagcacagacagcccctgccaggaggtgccctatcccaccatccctgggcaggcagctgtccttggggggctggggtgccctctggtggcagcagcactgcacagacccccagggtcagggccggcagctgtacaggcctggggacacctgcagggtgaggtcaggagtgccaggccatgcagaggcgggtcgagggagccattggtcctcattcctgagggtccagaaccagaacggtcttgatgcaggtcttgatccagtgagtcacctgggcacttggctggggacactgaagtgagccagaaacacatccccaggggagcccccagacccagagaggggcccaggatggaaggggacaagccaggggaggggtgtgtccctctcatggtcagggaggttccctgaaggacttttgggctaagacctgacccacaggaagggtgttggggcacagggaaaagtgtgtgcagtggctcagaggttgggaggagctccgttgggtttagaggaggggagaagcaaaggggtcatgggggactagatgctcttgttggtttggtcagaagctggtagagggttcacgggagtgatgagatggaatttgctgcatcagaagtgtgagagacagccaggctcattggctcacagctgcaatactagctatacaggaggccaagttgggaggatcgcttgagccaaagagtttgagatcagcctgggcaacatagcaagaccctgtgtctacaaaaaagaaaacagcaaaaataattggcctgggtgatggcacatggctgtagtccccactacttgggaggctgaggtgggaggattgcctgagcccagaaagttgaggctgcagtgagctgtgactgcaccactgcactccagcctgggcaacagagcaagaccctctctctaaaacaaaaaagaaatgtgaagtgagagaccttgataaattgggggaggggtgtctgcacatagtaggcaccacctgaatgtcagcaccagccccagtgtggctcttcttctgattgggcctgaattcctggcccgtgtctcctgtcctcccctccactccaaccccatcccactccatcctccctccaggagcacccagccccggccctggcccccaacgggtccccaaaggacagcccagcccatgaggtgaccggcagcggcggggcctacatgtgctttgacgtactgtggccaagggtccagcgcagctggcccaccttcagaggtgagtgcgggaggtccctctgcagccctggggctggcacccaggcagggggtgagggggtgggggaggcaggcaggggtccccgtgggcgctgcctctgacccccacccgccaccgcccagccgtgttactgcaccgctacgtggtggcaggggtgatctgggccgacatgctctccatcgccgtgacctacttcatcacgctgtgcctgttccccgaccttgagtctgagatctgccactgcatcctgggcgagtggctgcccatcctcatcatggctgtgttcaacctgtcagacttcgtgggcaaggtgggctgcctgccctgcccggtgtcgggggacaccatggggtgggggtgacggggaggccctggcccatccgggaagggttctgagtgaaggatgcatgtggctcccaggtggaaagggcaagagccatgcagtggcaccatcctggacagtgtcctctggaggacagctccggcctgatctcactggggcgctccggagtgtcagctgtatctcagaggacaggcgtggccctcaccctctcgcctcatggtcacagatcccccggggatgagcacaggaggatgccccagaggggacccagagagggcagggacacttagaaatggctcaaagaaatggccaggttcagtggcttatgcctgtaatcccagcagtttgggaggccagagatgggtagatcacttgaggccaggagttcgagaccaaccttgccaacatggtgaaaccccgtgtctactgaaaatacaaaaattaatggaagtggtggagtgtgcctgtagtcccagctactcaggaagctgaggcaggagaatcgcttgaacccaggaggtggagggtgcagtgagccgagatcgtgccactgcactccagcctgggtgacagcacgagactctgtctcaaaaaacaagcaagcaaacaaaaaaaaatcactcagccgtggtggtgcgtgcctatggtcccagctactcgggaggctgaggtgggaggatggcttgagcccaggagtttgaggctgcagtgagccaccatcgtgtcactgcactcgagcttgggggttagaccgataccctgactctaagggaaaaaaatgtaagtggaatttggggggttttagaggggcgatccggagaagggcaggggtgcaggctgagctggacaggcccaggagtgtttaaggatggggatgtggctggaggctgtcgggggtatgaggggagtggggctgtggccaggacagggcggccacgtgcctggctctctgcagatcctggtagccctgcccgtgtactggcggggcacccacctgctggcctgctcctgcctgcgtgtggtcttcatccccctcttcaccctgtgcgtctaccccagcggcatgcccgccctccgccaccccgcctggccctgcattttctcactgctcatgggcatcagcaacggctccttcggcagcgtgcccatgatcctggcagcaggcaaagtgagccccaagcagcgggagccggcaggtgaggaccgcgggacatgggggtgggggcgtcctcccagcagcgcaatgcccaccttgcgaggaaacccaggccagaccacaagaaggtgcatttgggttccgggtgttcagaacagtcaatgtctgggaggccataggtgtggggacattctcagccactttattcactcatttattcgttcgttcatcccacaactacttggtgagcccctcctgtggaccaagtgcttttcaaggcactggggacatagtggcgacaaaacggcgctccatgtgctgtgggactgactgtccagatgtggaggcagcccaggccgggcacagtggctcgtacctgcaatcccagcactttggaagggcaaagtgggtggatcacttgagcccaggagttaaagaccatcctgggcaacacagtgagagcctctcctctctacaaaaatgtttaaaaaattagctggatatggtagcgtgtgcctatggtcccagctactcgggaggctgagatgggaggatcacttgagcccaggagtttgaggttgcagctgtgatcacgccactgcactccagcctgggtgacagagcaagatcctgtctgaaaaaaaaaaaaaaagatcccagatcggcgtgactggttgaatggcagtaagtcctatggggaaaaataaagcagagaaacaggagtgatgggatgggagagtcaggctcaggagccagcagtgtaaaaggagcaatctgggaagacctcactgaggaggtgacttttgagcaaagacctggaggaggtagcaagagagatagccatgtgaggatgcaagggaaaggcatccaggaagagggaacagcatgtgcaaagatcctgcggcactgaggccaggggacagagcagaagaggaacggggtttgatggttgataaagcatccccccagctgccgtgggcatggaggtgagtgaggagctacttcaccagtccaagcccttgagaatggggctcaaacctggaggaggttgacgtggcactgggaggtgccagattccaggtcttgtttggacagcagcccaaaggaccggctgatgggttgagaggtagggtgtgagagagggaagggggctccaggtttggggtccactgctcaaggcaagaaggctggcactggcacagactgagatgggaaggggcctcgcagggaggggttggggttgggtttgggacttggtacattcaaggtgcccatcggacatcccaaattgtccctgatagggaggaagctgtaggtcggagagtggagtttttttttctttttagatggagtcttgctctgttccccaggctggagtgcagtggcatgatctcagctcactgcaacctctgcctcgcaggttcaagcaattctcatgcctcagccttctgagtagctgggattatggatgcccaccaccatacctggctaatttttgtatttttagtagaggtgagatttcaccatcttggccaggctggtctcgaactcctaacctcaggtgatctgcctgcctcagcctgccaaagtgctgggattacaggtgtgagccaccacacctggctgagactggagattaaaacggggagggttggggccaggcgcactggctcaggacggtgttttgggaggccaaggtaggactattgcttgggaccagcctgggcagtatagcgagaccgagtctctacaaaaaatttttttacattagccaggcgtggtggtgcatgcctgtggtcccaggtactcgggaggctgaggtgggaggatcgcgtgagcccaggaggtcaaggctgcaggaagctatggttgtaccactgcactctggtctgggcaacagagcaagaccttgtctttaaattttaaaaatgggggcttgggggactcagagaagcaggcaaggcctggagtgcatagcagatggcctcgggaagaagcaacgaggaaggacaggatcgtcctggaggggtggcacggttcatgcaggtgtcaccgcacctcacacccgagcagctgtggccaccaggtggccgccctggccctgctcccctcaggccagtgttgtccacagggaacaccatgactgtgtcctacgtgtcagggctgacactggggtccgccgtggcctactgcacctacagcctcacccgcgatgcccacggcagctgcctgcacgcctccaccgccaatggctccatcctcacaggcctctgagccagccccgcccactgccagggacaccgagggcctgaccaggggccccgaggcctgagggccctcccccatccccacctcagtgcctgcggggccctgagactccccctgtgccagcagcaccactccctcagggtctagccatcccccaccctggactgaagttctgcaaagtcctttgaggaccagaacacgtttct

SEQ ID NO: 2006 - protein, 553 aa, Homo sapiens
MVGAPPPASLLPCSLISDCCASNQRDSVGVGPSEPGVGYNLVMRRFLSPSEKRSIWVGVTRFSRCCPAPLSLTRKGNSLTPCASRVRQCLALLRLTHGTAGVMISLSRILTELLLPDERASMLIFFLVSVALELLCFLLHLLVRCSGFVLFYTTRPRDSRRGRPGLGRGSGYRVHHDVVAGDVHFVSAHRPPPFPPLSPPRRREVPGAQPLPCIPGCGLLLWWRILPASTLYSVDSVTPHMMYTKVSIPGTAHVRSEGLSPPGCANPRWRVLLQAQPGSKLSRKLTLFLPRDGTPGGKSGLRDNPGFPEGEHPAPALAPNGSPKDSPAHEVTGSGGAYMCFDVLWPRVQRSWPTFRAVLLHRYVVAGVIWADMLSIAVTYFITLCLFPDLESEICHCILGEWLPILIMAVFNLSDFVGKVGCLPCPILVALPVYWRGTHLLACSCLRVVFIPLFTLCVYPSGMPALRHPAWPCIFSLLMGISNGSFGSVPMILAAGKVSPKQREPAGNTMTVSYVSGLTLGSAVAYCTYSLTRDAHGSCLHASTANGSILTGL

SEQ ID NO: 2007 - DNA, 1270 bp, Homo sapiens
  source (1)..(1270)
  CDS (201)..(1070)
atgccctatctaaggcagtagctgctgtttgtttttattttattattacctcatgagaagatcccatgaggatcctgccagattttctgaatattcaaaagaaaatctttacatcatggattttatgtttggggaaggaagagataaagatagagagataaacagacaattatctttttttttttttttttttttttgagatggagtctcactctgtggcccaggttggagcgttggagtgcagtggcatgatcttggctcactggaaccttcgcctccgctggctgtctgtcgtgttgctcgtgtcctctggtccctctccctgttcgctggtcgtattatctggctcctcttactcactttcgctcctgtctctctttcgtcttcttgtcctatctacttgggttttgttttcttttttgtgctgtcttgttcttgtgcgcgtggctgtgcgccttgcttttgcgcgcgtctggatctcgccggctcgctcgtctgctctgccgctctgcctgtggtgctcctgcgtgcgtcgtgggtgctgttttgtctcgccggcgcgcgccgtatctcgtcggcgtctccgcgtggtgcttactttctgttccgcctcttgttctggtctgctgcttccgtgtcttgtcttactgtattgtggttgtgtctcttatgtcactttgcttcgtggcccgtcccgtctcttgcctgtcgtccgctgctctctgcttctgtctgcccctgtgggtattgtttctttttgtcagtctcgtcccctgtctgctgtgttcggcgcgctctggccgtcgctttcttgttcgctatctgtcctgtggtctgctgcgtgtgtgcctctctgctgttcgtctcgcggtgttctgtctttgggtctgtctgtttgcttcctgcgtctcgtcccttctgctgctggtgtgtgggctgtgtgctggtcgctcttgtcgtcgttcggccgctgccgtggtgcctcggtgctgtgttgcgccgcgcgcctgttctgggtgcgcttgttggcgcgcgtgatgtctgctgccgtgcggcttcctgggggctgagttccttcgctgcgctgtcgcgtggcggtgtcgtgcgcgtgtcctctgtgctgggtgtgggtgtctggtctggccgggtgacggctccttctcgtcctggctcgcctcacgttctctgttctctctctcggtcctggttcttctctgcttttgtgtgtgagttcctcttctctagtgtctctgtttcttgtctgcgttgc

SEQ ID NO: 2008 - protein, 289 aa, Homo sapiens
MESHSVAQVGALECSGMILAHWNLRLRWLSVVLLVSSGPSPCSLVVLSGSSYSLSLLSLFRLLVLSTWVLFSFLCCLVLVRVAVRLAFARVWISPARSSALPLCLWCSCVRRGCCFVSPARAVSRRRLRVVLTFCSASCSGLLLPCLVLLYCGCVSYVTLLRGPSRLLPVVRCSLLLSAPVGIVSFCQSRPLSAVFGALWPSLSCSLSVLWSAACVPLCCSSRGVLSLGLSVCFLRLVPSAAGVWAVCWSLLSSFGRCRGASVLCCAARLFWVRLLARVMSAAVRLPGG

SEQ ID NO: 2009 - DNA, 1543 bp, Homo sapiens
  source (1)..(1543)
  CDS (201)..(1343)
  modified_base (681)..(780): a, t, c, g, unknown or other
gtatgtgcacatgtcatggtgtgtgcatgtgtctctgtgtgtgtgcatgtgttttggtgtgtgtgcacgtgcctctttgtgcctatctctgtgcgtgtacacatgtttgtgtgtgcatgtgtctctgtgtgtgcatgtttcttggtgtgtgtacacgtgtctgtgtgtgtgcataactctgtacacgtgtctgtgtgtgcatgtgtctctgtgagtacatgcgtctgtgtatgtgtctctgtgtgtgtatacatgtctgtgtgtgtgcatgtgtctgtgtatacacgtatctgtgtgtgcatgtgtctatgtgtacacgtgtcttggtgtgtgttcatgtgtctctgtgtgcatgtatcttggtgtgtgtgaatgtgtctgtgtgtgcatgtgttttggtgtgtgtgcacgtgtctctgtgtgttcctatctctgtgtgtgtacactgtgtgtgtacacatgtctgtgtgtgcacgtgtctctgtgtgcatgtgtctgtgtacacatgtcttggtgtgtgtgcctgggtctctctgtgtgtgcatgtgttttggtgggggtgcacgttgtctttttgtatggggccggggtgtccacgtgtctgggggaggcatgtgtccggtggtggtgggcgggtcttcctcgcggggccttgtgccgtcgggattgtggtttggggcnnnnnnnnnnnnnnnnnnnnnnnnnnnnnnnnnnnnnnnnnnnnnnnnnnnnnnnnnnnnnnnnnnnnnnnnnnnnnnnnnnnnnnnnnnnnnnnnnnnngcctatctctgtgggtgtacacgtgtctgtgtgtgcatgtttcttggtgtgtgtacatgtatctctgtgtgtacatgtgtcttggtgtatgtgcacatgtcatggtgtgtgcacgtgtctctgtgtgtgtgcatgtgttttggtgtgtgtgcacgtgcctctttgtatgtgcctatctctgtgggtgtacacgtgtttgtgtgtgcatgtgtctctgtgtgtgcatgtttcttggtgtgtgtacacgtgtctgtgtgtgcatgtttcttggtgtgtgtacacgtatctctgtgtgtacatgtgtcttggtgtatgtgcacatgtcatggtgtgtgtgcatgtgttttggtgtgtgtgcatgtgcctctttgtatgtgcctatctctgtgggtgtacacgtgtctgtgtgtgcatgtgtctctgtgtgtgcatgtttcttggtgtgtgtacacgtgtctgtgtgtgcatccgtctctgtgtgtgtgcacgggtatctgtgtgtgcagcattggcctctcggatgggcaccagaggccctggtccagctcaggcacccaaagtaacagcagtcttgagcccagctgtgactttcgtgacaacccatttggagggacacccactgctgggtgcttgctctagcacccggagggctcgacgaagcgacagactgaagctctccgtctgtcggcagctgtatttttcgcactgccttgaaaggtgggcgttgcttaaataactcagcctggtactgtgaaatggattt

SEQ ID NO: 2010 - protein, 380 aa, Homo sapiens
  MOD_RES (161)..(194): Variable amino acid
MCLCEYMRLCMCLCVCIHVCVCACVCVYTYLCVHVSMCTRVLVCVHVSLCACILVCVNVSVCACVLVCVHVSLCVPISVCVHCVCTHVCVCTCLCVHVSVYTCLGVCAWVSLCVHVFWWGCTLSFCMGPGCPRVWGRHVSGGGGRVFLAGPCAVGIVVWGXXXXXXXXXXXXXXXXXXXXXXXXXXXXXXXXXXLSLWVYTCLCVHVSWCVYMYLCVYMCLGVCAHVMVCARVSVCVHVFWCVCTCLFVCAYLCGCTRVCVCMCLCVCMFLGVCTRVCVCMFLGVCTRISVCTCVLVYVHMSWCVCMCFGVCACASLYVPISVGVHVSVCACVSVCACFLVCVHVSVCASVSVCVHGYLCVQHWPLGWAPEALVQLRHPK

SEQ ID NO: 2011 - DNA, 1252 bp, Homo sapiens
  source (1)..(1252)
  CDS (201)..(1052)
ataaactggatgaaaatgtaagctctattagtcccgcccatccaccagagattccccacccataacctactggccacagggaaaaaagcatatgcaccatgatatttttatacacgttgtgttaactactgtaaacacattgtcttctttatatttctttgcaggaagttcagaaaaaagtgtcacgttttaatctgcagatggacataagtggattaattcctggtctagtgtctacattcatacttttgtctattagtgatcactacggacgaaaattccctatgattttgtcttccgttggtgctcttgcaaccagcgtttggctctgtttgctttgctattttgcctttccattccagcttttgattgcatctaccttcattggtgcattttgtggcaattataccacattttggggagcttgctttgcctatatagttgatcagtgtaaagaacacaaacaaaaaacaattcgaatagctatcattgactttctacttggacttgttactggactaacaggactgtcatctggctattttattagagagctaggttttgagtggtcgtttctaattattgctgtgtctcttgctgttaatttgatctatattttattttttctcggagatccagtgaaagagtgttcatctcagaatgttactatgtcatgtagtgaaggcttcaaaaacctattttaccgaacttacatgctttttaagaatgcttctggtaagagacgatttttgctctgtttgttactttttacagtaatcacttatttttttgtggtaattggcattgccccaatttttatcctttatgaattggattcaccactctgctggaatgaagtttttataggttatggatcagctttgggtagtgcctcttttttgactagtttcctaggaatatggcttttttcttattgtatggaagatattcatatggccttcattgggatttttaccacgatgacaggaatggctatgaccgcgtttgccagtacaacactgatgatgtttttaggtgagttccaagtgtagctttagaactaactatgtatttgatattcatataaaatgaatttagtctactgggggagaaactttaatctaaagccctctatttaagccattctagttcaattaaagggtaataactagtttgccaggagtcaataagccaaaagccgaattcactttaaaaatttaatccactgaataaccacaatttcccaaatgtg

SEQ ID NO: 2012 - protein, 283 aa, Homo sapiens [sequence omitted]

SEQ ID NO: 2013 - DNA, 1252 bp, Homo sapiens
  source (1)..(1252)
  CDS (201)..(1052)
ataaactggatgaaaatgtaagctctattagtcccgcccatccaccagagattccccacccataacctactggccacagggaaaaaagcatatgcaccatgatatttttatacacgttgtgttaactactgtaaacacattgtcttctttatatttctttgcaggaagttcagaaaaaagtgtcacgttttaatctgcagatggacataagtggattaattcctgggctagtgtctacattcatacttttgtctattagtgatcactacggacgaaaattccctatgattttgtcttccgttggtgctcttgcaaccagcgtttggctctgtttgctttgctattttgcccttccattccagcttttgattgcatctaccttcattggtgcaatttgtggcaattataccacattttggggagcttgctttgcctatatagttgatcagtgtaaagaacacaaacaaaaaacaattcgaatagctatcattgactttctacttggacttgttactggactaacaggactgtcatctggctattttattagagagctaggttttgagtggtcgtttctaattattgctgtgtctcttgctgttaatttgatctatattttattttttctcggagatccagtgaaagagtgttcatctcagaatgttactatgtcatgtagtgaaggcttcaaaaacctattttaccgaacttacatgctttttaagaatgcttctggtaagagacgatttttgctctgtttgttactttttacagtaatcacttatttttttgtggtaattggcattgccccaatttttatcctttatgaattggattcaccactctgctggaatgaagtttttataggttatggatcagctttgggtagtgcctcttttttgactagtttcctaggaatatggcttttttcttattgtatggaagatattcatatggccttcattgggatttttaccacgatgacaggaatggctatgaccgcgtttgccagtacaacactgatgatgtttttaggtgagttccaagtgtagctttagaactaactatgtatttgatattcatataaaatgaatttagtctactgggggagaaactttaatctaaagccctctatttaagccattctagttcaattaaagggtaataactagtttgccaggagtcaataagccaaaagccgaattcactttaaaaatttaatccactgaataaccacaatttcccaaatgtg

SEQ ID NO: 2014 - protein, 283 aa, Homo sapiens
MDISGLIPGLVSTFILLSISDHYGRKFPMILSSVGALATSVWLCLLCYFALPFQLLIASTFIGAICGNYTTFWGACFAYIVDQCKEHKQKTIRIAIIDFLLGLVTGLTGLSSGYFIRELGFEWSFLIIAVSLAVNLIYILFFLGDPVKECSSQNVTMSCSEGFKNLFYRTYMLFKNASGKRRFLLCLLLFTVITYFFVVIGIAPIFILYELDSPLCWNEVFIGYGSALGSASFLTSFLGIWLFSYCMEDIHMAFIGIFTTMTGMAMTAFASTTLMMFLGEFQV

SEQ ID NO: 2015 - DNA, 1129 bp, Homo sapiens
  source (1)..(1129)
  CDS (201)..(929)
tccatccatccttccatttgtttttcaggccatatctcagtctgtctctgtcttcagacagtctttccaattctatctgtctctgactgttctctgcctctcaggctgtgttcctccacacgtgcatacctgtgagtctcttcttctctgtctcatatatgtgtcttaatttatttttcaatgtatgtatcttctgatctatgtctttctcctctgtctgcatatatacatgtctgtctctcattctctctactctctctccttactttaggtgtgtctgtttctctggtggatttttctttttcactctggcatttctctctctgtgtgaggagagagagagatatatatatagatatagatatagatatctgtatcttgtctctttcgctatatgtctgaaagagccatatcttgtctctttcactatatgtgtctcttgtctgtatgtacatctctttctctgtatctgtccgcatgcctgtgtctctatcactctcaatgtgtctcttttttttctctgtccctcactatacatctgtctctttcttaccaagtctcttactgcggtatctctctttctctatgagtctctgtgtatgcttctctttctgtgtgcctccaggtgtgtgtcagtgcctctatgtgtttccctcttcaagtatcttccttcctgtgtctctttctctgaggatctccttctctatgtgttttctttctctgaatgtggctctgtacatctctgtcacagtcattctgtctcctctgtctctttgtatgtaggcgtgtttctatttcctggtgtgtctttttttttctccctctctcaatgtcttttctgtgtctcctctgtgtgcatgtgtgtgtccctttctctctgtgtgtatgtctcttttctctgtgtgtctttctttgtatctctttcataatccctgggtctctgtgtgcatgttttgtgtgtgtgtgtgcgcacttgtctacctctgtctaatatattggttagaacaaacacacttcactcagtgccttgaactagaacaacacctggggcttggtattaataccttaaaagtccttaccttttgaccagttctccatttgtatttctgttcttgtttgctctggcaat

SEQ ID NO: 2016 - protein, 242 aa, Homo sapiens [sequence omitted]

SEQ ID NO: 2017 - DNA, 1288 bp, Homo sapiens
  source (1)..(1288)
  CDS (201)..(1088)
tgggggcgtcctcgcctcgctgggcttcgtcttctcggctttcgccagcgatctgctgcatctctacctcggcctgggcctcctcgctggtgagggaagtgggatgcccgggtcattcagggtgaaggaggtgacaggagcttgttgggatctggggtagcgaacgaggcgggggcctggtgcggagagccgggctgggaatgctggggcgggcgtccccagtgccggcccccatcccctcctattcattcgcaggctttggttgggccctggtgttcgcccccgccctaggcaccctctcgcgttacttctcccgccgtcgagtcttggcggtggggctggcgctcaccggcaacggggcctcctcgctgctcctggcgcccgccttgcagcttcttctcgatactttcggctggcggggcgctctgctcctcctcggcgcgatcaccctccacctcaccccctgtggcgccctgctgctacccctggtccttcctggagaccccccagccccaccgcgtagtcccctagctgccctcggcctgagtctgttcacacgccgggccttctcaatctttgctctaggcacagccctggttgggggcgggtacttcgttccttacgtgcacttggctccccacgctttagaccggggcctggggggatacggagcagcgctggtggtggccgtggctgcgatgggggatgcgggcgcccggctggtctgcgggtggctggcagaccaaggctgggtgcccctcccgcggctgctggccgtattcggggctctgactgggctggggctgtgggtggtggggctggtgcccgtggtgggcggcgaagagagctgggggggtcccctgctggccgcggctgtggcctatgggctgagcgcggggagttacgccccgctggttttcggtgtactccccgggctggtgggcgtcggaggtgtggtgcaggccacagggctggtgatgatgctgatgagcctcggggggctcctgggccctcccctgtcaggtaaggacctgagctcacagatctgcctacaactatcctctgcccctggggttcgaggcttctaaatgcccttacccatctcctcaggcttcctaagggatgagacaggagacttcaccgcctctttcctcctgtctggttctttgatcctctccggcagcttcatctacatagggttgcccagggcgctgccctcctgtggtccagcctcccctccagccacgcctcccccagagacgggggagctgcttcccgctccccaggc

SEQ ID NO: 2018 - protein, 295 aa, Homo sapiens [sequence omitted]

SEQ ID NO: 2019 - DNA, 1366 bp, Homo sapiens
  source (1)..(1366)
  CDS (201)..(1166)
  modified_base (891): a, t, c, g, unknown or other
tccttccccctctccactggcagattttgaaagctgtgctaagattctctgaggtttagggctccaaaggaagtcctcatccctgtagctcccgggatggcgaggatttggggattgtggaacccagagtgaggaaccgcaccctggtcattgtgcccctacaggaagtggagacccttacctcccactggaccctctacatgaacgtgggcggcttcctggtggggctcttctcgtccaccctgctgggagcttggagcgacagtgtgggccgccgcccgctgctagtgctggcctcgctgggcctgctgctccaggccctagtgtccgtttttgtggtgcagctgcagctccacgtcggctacttcgtgctgggtcgcatcctttgtgccctcctcggcgacttcggtggccttctggctgctagctttgcgtccgtggcagatgtcagctccagtcgcagccgcaccttccggatggccctgctggaagccagcatcggggtggctgggatgctggcaagcctcctcgggggccactggctccgggcccagggttatgccaaccccttctggctggccttggccttgctgatagccatgactctctatgcagctttctgctttggtgagaccttaaaggagccaaagtccacccggctcttcacgttccgtcaccaccgatccattgtccagctctatgtggctcccgccccagagaagtccaggaaacatttagccctctactcactggccatcttcgtggtgatcactgtgcactttggggcccaggacatcttaaccctttatgaactaagcacacccctctgctgggactccaaactaatcggctatggttctgcagctcagcatctcccctacctcaccagcntgctggccctgaagctcctgcagtactgcctggccgatgcctgggtagctgagatcggcctggccttcaacatcctggggatggtggtctttgcctttgccactatcacgcctctcatgttcacaggtaaagtgtgtgggctcagggacagcttgtcccagaggcactgggtaagaactgggggccggccactcactgcccccagatgtggttcattcctgtgtctttggaaacatagttatgcccccagcctgcactggagaacagacaactaagaaatccctcaaaaatgccatctttgatacatggaaaatatagaccttcagtagctaaagtaattaacccactgttatcaaccattaatattgttagtaatatagagcaaaagacaaaagtgtggctcatacactaattgctttaccccttggcctcccaccgcctattcatatgttcttaaacaaagtccatgccatta

SEQ ID NO: 2020 - protein, 321 aa, Homo sapiens
  MOD_RES (231): Variable amino acid
MNVGGFLVGLFSSTLLGAWSDSVGRRPLLVLASLGLLLQALVSVFVVQLQLHVGYFVLGRILCALLGDFGGLLAASFASVADVSSSRSRTFRMALLEASIGVAGMLASLLGGHWLRAQGYANPFWLALALLIAMTLYAAFCFGETLKEPKSTRLFTFRHHRSIVQLYVAPAPEKSRKHLALYSLAIFVVITVHFGAQDILTLYELSTPLCWDSKLIGYGSAAQHLPYLTSXLALKLLQYCLADAWVAEIGLAFNILGMVVFAFATITPLMFTGKVCGLRDSLSQRHWVRTGGRPLTAPRCGSFLCLWKHSYAPSLHWRTDN

SEQ ID NO: 2021 - DNA, 1243 bp, Homo sapiens
  source (1)..(1243)
  CDS (201)..(1043)
tcctgctgtgcccaaatgcatcttgggtcccactgtgcgaggacgagagtagggcacgggcagcccgtgagtggggcaggtgagagatagaccctgaagtcccactgcccagcaagcccctgctgtcatgaggccgcagctctgctggggctggccggctgggctgtgggcgtgaacatgtgagtaaatgtccttagggaatgggttgcgtgtcttcactgttccacacagagcatttcgtctttttgtgcatttctacgtgtgcattcctggtgtgtatttgcacatctgccatctgtgtgtgttctggagtgtgtctgtacacgtatgttcctggtgtattgttcatgcatattcctggagtgtgtctgtgtatgtgtgttcccggtgtgtatttgcacatgcatgcatattcctggagtgtgtctgtgcacgtgttactggtgtgtatttgcacaagtatgcatattcctggagtgtgtctgtgcacgtgtgttcccggtgtgtatttgcacaagtatgcatattcctggagtgtgtctgtgcacgtgtgttcccgctgtgtatttgcacatgcatgcatattcctggagtgtgtctgtgcacgtgtgttcccgctgtgtatttgcacaagtatgcatattcctggagtgtgtctgtgcacgtgtgtttctggtgtgtatttgcacatgcgtgcatattcctggagtgtgtctgtgcacgtgtgttcctggtgtgtatttgcacaagtatgcatattcctggagtgtgtctgtgcacgtgtgttcctggtgtgtatttgcacatgcgttcatgttcctggagcatgtctgtgcacgtgtgtccctgatgtgtatttgcacgtgcacgcatgtgtgtgcttgtgcaccccggctccgtcttcctctcgtcctctctgcccgccgccctcctgggccagactctcctgttctgagtggaaggcaacgaaggcctgggttgcacaggcccgtctggggtcacaggcatgtcagggccgcctgctcctaaacctcctgcactgagatgggaatgggaggggaggctggcgagggctccttcggttcagacgcctcctcccaaatgaacggcaaatgtcaaatgcagccctaaggaaaatagttcccacacctaatcatgtccgggagaggtcggtgggggggcgccgggagcacatgctgggtgggaacaagggccctttgtgtgccatgggcagctgtggccg

SEQ ID NO: 2022 - protein, 280 aa, Homo sapiens
MGCVSSLFHTEHFVFLCISTCAFLVCICTSAICVCSGVCLYTYVPGVLFMHIPGVCLCMCVPGVYLHMHAYSWSVSVHVLLVCICTSMHIPGVCLCTCVPGVYLHKYAYSWSVSVHVCSRCVFAHACIFLECVCARVFPLCICTSMHIPGVCLCTCVSGVYLHMRAYSWSVSVHVCSWCVFAQVCIFLECVCARVFLVCICTCVHVPGACLCTCVPDVYLHVHACVCLCTPAPSSSRPLCPPPSWARLSCSEWKATKAWVAQARLGSQACQGRLLLNLLH

SEQ ID NO: 2023 - DNA, 2029 bp, Homo sapiens
  source (1)..(2029)
  CDS (201)..(1829)
cataaaaacatgggtctatctccgcataggagaaatcattggcatttacatacccgtcaccactagggttgattacgtttcctttgacccagtagtccctcataatcaagttgatttccctcttaagagattagttctttaaacttctgctctggtctttttctgccctcttaggtcatggattatatgggacttttgaaatgttatcctcctggaggaaaactagagaagaccaacatgttaaagagagaactgcagcagtctatgcagactccatgctctccttttctctcaccactgccatgtacctggtcacctttggcataggggccagccctttcacgaacattgaggcagccaggattttctgctgcaattcctgtattgcaatcttcttcaactacctctatgtactctcgttttatggttccagcctagtgttcactggctacatagaaaacaattaccagcatagtatcttctgtagaaaagtcccaaagcctgaggcattgcaggagaagccggcatggtacaggtttctcctgacggccagattcagtgaggacacagctgaaggcgaggaagcgaacacttacgagagtcacctattggtatgtttcctcaaacgctattactgtgactggataaccaacacctatgtcaagccttttgtagttctcttttaccttatttatatttcctttgccttaatgggctatctgcaggtcagtgaagggtcagaccttagtaacattgtagcaaccgcgacacaaaccattgagtacactactgcccagcaaaagtacttcagcaactacagtcctgtgattgggttttacatatatgagtctatagaatactggaacactagtgtccaagaagatgttctagaatacaccaaggggtttgtgcggatatcctggtttgagagctatttaaattaccttcggaaactcaatgtatccactggcttgcctaagaaaaatttcacagacatgttgaggaattcctttctgaaagcccctcaattttcacattttcaagaggacatcatcttctctaaaaaatacaatgatgaggtcgatgtagtggcctccagaatgtttttggtggccaagaccatggaaacaaacagagaagaactctatgatctcttggaaaccctgaggagactttctgtcacctccaaggtgaagttcatcgtcttcaatccgtcctttgtatacatggatcgatatgcctcctctctgggagcccccctgcacaactcctgcatcagtgctttgttcctgctcttcttctcggcattcctggtggcagattcactgattaacgtctggatcactctcacagttgtgtccgtggagtttggagtgataggtttcatgacattatggaaagtagaactggactgcatttctgtgctatgcttaatttatggaattaattacacaattgacaattgtgctccaatgttatccacatttgttctgggcaaggatttcacaagaactaaatgggtaaaaaatgccctggaagtgcatggggtagctattttacagagttacctctgctatattgttggtctgattcctcttgcagctgtgccttcaaatctgacctgtacactgttcaggtgcttgtttttaatagcatttgtcaccttctttcactgctttgccattttacctgtgatactgactttcctgccaccctctaagaaaaaaaggaaagagaagaaaaatcctgagaaccgggaggaaattgagtgtgtagaaatggtagatatcgatagtacccgtgtggttgaccaaattacaacagtgtgataatgtctgcttggcatattttcaccttaggtcttatcaagaccaaagagattatgttaatgaaacaattaaattcaaagttcttcccttttttaaagataggaaacaggcattgccaaaaaaaaaaaaaaaaaaaaaaggaaaggacagtggggagaaatgggcctggcatattttcagtctttaaaacaaaggagttg

SEQ ID NO: 2024 - protein, 542 aa, Homo sapiens
MLSSWRKTREDQHVKERTAAVYADSMLSFSLTTAMYLVTFGIGASPFTNIEAARIFCCNSCIAIFFNYLYVLSFYGSSLVFTGYIENNYQHSIFCRKVPKPEALQEKPAWYRFLLTARFSEDTAEGEEANTYESHLLVCFLKRYYCDWITNTYVKPFVVLFYLIYISFALMGYLQVSEGSDLSNIVATATQTIEYTTAQQKYFSNYSPVIGFYIYESIEYWNTSVQEDVLEYTKGFVRISWFESYLNYLRKLNVSTGLPKKNFTDMLRNSFLKAPQFSHFQEDIIFSKKYNDEVDVVASRMFLVAKTMETNREELYDLLETLRRLSVTSKVKFIVFNPSFVYMDRYASSLGAPLHNSCISALFLLFFSAFLVADSLINVWITLTVVSVEFGVIGFMTLWKVELDCISVLCLIYGINYTIDNCAPMLSTFVLGKDFTRTKWVKNALEVHGVAILQSYLCYIVGLIPLAAVPSNLTCTLFRCLFLIAFVTFFHCFAILPVILTFLPPSKKKRKEKKNPENREEIECVEMVDIDSTRVVDQITTV

SEQ ID NO: 2025 - DNA, 1201 bp, Homo sapiens
  source (1)..(1201)
  CDS (201)..(1001)
ctttaatcagtcgcaaaatttctgggcagtctccagcctctgcatgtcttatttgaaagtaatccatgcttgtttgcctcatgcccatttggctcacacttggttggctcctgcctggttgactcaggcctggttggctcagcactaattggttcaggtcttgttggctcaggcctggctgactcggccccggttcccatatgcctggttggcccctgcctggatggctcatgcctgtttggttcttacttgattggctagtgcctggttgtctcatgcctagttggctggggacttgctggctcatgcctggttgccacatgcctcgttgccacatgcctggtggactcttgtttggttgcctcgggactggttggctcaggcctgtttgccatgtgcctggttggctcatgcctatttggcttgtgcctgattggctggtgcctacttgtctcatgcttggttggctcccacctgactgtctcatgtctagttgccacatcactggttggcttatacctgattggtttgtgcctgcttggctcgtgcttgattgtctggggcctgattggcttggggctcgttgcggtggacctggttggcttatgcttgcttcactcaggactagttcgctcaggctttgtggccacatgcctggttggctcctacctaattgccatgtgcctggttgtttcatgccaggttggtttatgtctggtaggtttgtacctgattgcctcatgccagcttggctcatgcttggttgtttcatgtccacttggttcatttcatataggcttgcactccattggttcatgtccatttggttcataccaagtaagcttgggcttggctggattatacctgtttggttggaatctgataaacttgattggtttgcgtctggttggctcatgtctgtttggttcttacatgattggctagtgtctggttgccttatgcctggttggctggggacttgctggctcatgcctggttgactcatgtctgggtggcttgggacttgctggctgatgcctggttgttgcacgcctggttgccacatgcctggtggactcatgtttggttgcctcaggactggttggctcagtcctgtttgccatgtgcctggttggctcatgcctatttggcttgtgcctaattggctggtgcctacttgtctcatgcttggttggctccc

SEQ ID NO: 2026 - protein, 266 aa, Homo sapiens
MPGWPLPGWLMPVWFLLDWLVPGCLMPSWLGTCWLMPGCHMPRCHMPGGLLFGCLGTGWLRPVCHVPGWLMPIWLVPDWLVPTCLMLGWLPPDCLMSSCHITGWLIPDWFVPAWLVLDCLGPDWLGARCGGPGWLMLASLRTSSLRLCGHMPGWLLPNCHVPGCFMPGWFMSGRFVPDCLMPAWLMLGCFMSTWFISYRLALHWFMSIWFIPSKLGLGWIIPVWLESDKLDWFASGWLMSVWFLHDWLVSGCLMPGWLGTCWLMPG

SEQ ID NO: 2027 - DNA, 1234 bp, Homo sapiens
  source (1)..(1234)
  CDS (201)..(1034)
  modified_base (210): a, t, c, g, unknown or other
  modified_base (215): a, t, c, g, unknown or other
  modified_base (219)..(228): a, t, c, g, unknown or other
  modified_base (266): a, t, c, g, unknown or other
  modified_base (904)..(1003): a, t, c, g, unknown or other
tagcagtcaactataaattccggaagccagacgtgtgtcatctatcctcattccttgaaacttgggggtatcctagatgaggtcaggagatgtcactgaccctgcccaactggtagtcatcagactttggaggaagcacaaacaggttggaacttttgttctgtgagtacgctaaactgttaaagccttgattgtttttgatgatgttgngtgantttnnnnnnnnnnttttttttggtggtggtttgtttttctttgggtggtgncgtcggtttgggggtgttggggtttccccccccctgggcgcgctgctctttttctccgccctccgggtcgcccctcgtcctcttggcgtttctcctccgctgcttctcgtttctgttgctggtgcgtgtgtgtgttcttcgtttttgttttttttttttgttcgccttgtttgctgttgttcgtgtttctctcttttcgtcgctccggggcggcggtcgtgctggtgttttttttggtttttgccttccttccgtttgccccctttccctttgttctttttgttttttgctcgcgctcctcttccgcttttttctcttttccccttctctgcggcgttttgttttctgctttgctcttgcttccctcgtccgccttggtctgcctgccctggcgctttgctcccggcctgttcggtgtctggctccggttttttgtttcgttgcgtgccgtttgctcagcccctcctctctctttcccgtctctctctattttttcttgctctgctcgtttctgtttgtgtttctcgttccttgtctcctctctttctgggtgctgtttgtcgtacctcctccgtcttgtcttcgccttgttgtctcctcgtggtgcgctggtctcgtgcgggtccccgtcttgtagnnnnnnnnnnnnnnnnnnnnnnnnnnnnnnnnnnnnnnnnnnnnnnnnnnnnnnnnnnnnnnnnnnnnnnnnnnnnnnnnnnnnnnnnnnnnnnnnnnnngttatccgtttctactaaacaacaaaaatagccgggcatggtggcttgcacctgtaatcccagctactcaggaagctgaggcaggagaatcacttgaaccctggaggcggaggctgcagtgagctgagactgtgccagcttaggtgacacagtgagactccatctcaaaaaaaaaaaaaaaaaaaaagaaatataaatcttgcagataaaatgataaatggtagaactgtt

SEQ ID NO: 2028 - protein, 277 aa, Homo sapiens
  MOD_RES (4)..(5): Variable amino acid
  MOD_RES (7)..(10): Variable amino acid
  MOD_RES (22): Variable amino acid
  MOD_RES (235)..(268): Variable amino acid
MMLXXFXXXXFFGGGLFFFGWXRRFGGVGVSPPLGALLFFSALRVAPRPLGVSPPLLLVSVAGACVCSSFLFFFFVRLVCCCSCFSLFVAPGRRSCWCFFWFLPSFRLPPFPLFFLFFARAPLPLFSLFPFSAAFCFLLCSCFPRPPWSACPGALLPACSVSGSGFLFRCVPFAQPLLSLSRLSLFFLALLVSVCVSRSLSPLFLGAVCRTSSVLSSPCCLLVVRWSRAGPRLVXXXXXXXXXXXXXXXXXXXXXXXXXXXXXXXXXXLSVSTKQQK

SEQ ID NO: 2029 - DNA, 1270 bp, Homo sapiens
  source (1)..(1270)
  CDS (201)..(1070)
tatatatactgtgtatgtatatactgtgtgtatatatatactgtgtgtatatacactgtgtatatatactgtgtgtatacactgtgtgtatatatatactgtgtatacatatatactgagtatacatatatactgtgaatatatatactgtgtatacatatataccgtatatataccgtgtatatatatactgtgtatatatgtaccgtgtatatatatactgtgtatatatgtaccgtgtatatacatactgtgtatttatatgtaccgtgtatatacatactgtgtatatatatgtaccctgtatatatatactgtgtgtatatataccgtgtatatatatacactgtgtgtatatataccgtgtatatatatacactgtgtgtatatataccttgtatatatatatactgtgcgtatatatatgctgtgtatgcatgtactgtgcgtgtatacagatgctgtgtatgcatgtactgtgcgtgtatacagatgctgtgtatgcatgtactgtgcgtgtatacagatgctgtgtatgcatgtactgtgcgtgtatacagatgctgtgtatgcatgtactgtgcgtgtatacagatgctgtgtatgcatgtactgtgcgtgtatacagatgctgtgtatgcatgtactgtgcgtgtatacagatgctgtgtatgcatgtactgtgcgtgtatacagatgctgtgtatgcatgtactgtgcgtgtatacagatgctgtgtatgcatgtactgtgcgtgtatacagatgctgtgtatgcatgtactgtgcgtgtatacagatgctgtgtatgcatgtactgtgcgtgtatacagatgctgtgtatgcatgtactgtgcgtgtatacagatgctgtgtatgcatgtactgtgcgtgtatacagatgctgtgtatgcatgtactgtgcgtgtatacagatgctgtgtatgcatgtactgtgcgtgtatacagatgctgtgtatgcatgtactgtgcgtgtatacagatgctgtgtatgcatgtactgtgcgtgtatacagatgctgtgtatgcatgtactgtgcgtgtatatagatgctgtgtatatatgtactgcgtgtatacagatgctgtgtgtatatacactgtctgtatatatgtactatgtgtatatacactgtctgtatatatgtactgtgtgtatatacactgtatatactgtgtgtatatacactgtctgtatatactgtgtgtatatacactgtctctatatactgtgtgtacatacactgtct

SEQ ID NO: 2030 - protein, 289 aa, Homo sapiens
MYRVYIYCVYMYRVYTYCVFICTVYIHTVYIYVPCIYILCVYIPCIYIHCVYIYRVYIYTVCIYTLYIYILCVYICCVCMYCACIQMLCMHVLCVYTDAVYACTVRVYRCCVCMYCACIQMLCMHVLCVYTDAVYACTVRVYRCCVCMYCACIQMLCMHVLCVYTDAVYACTVRVYRCCVCMYCACIQMLCMHVLCVYTDAVYACTVRVYRCCVCMYCACIQMLCMHVLCVYTDAVYACTVRVYRCCVCMYCACIQMLCMHVLCVYTDAVYACTVRVYRCCVCMYCACI

SEQ ID NO: 2031 - DNA, 1288 bp, Homo sapiens
  source (1)..(1288)
  CDS (201)..(1088)
  modified_base (526)..(625): a, t, c, g, unknown or other
ctttttaaaatatttttaaatttatttttttattttcaataggtttttggggaacaggtggtgtttggttatgtgaatgagttctttagtggtgatttgtcagattttggtgcacccatcaccaagcagtgtaccctgtacccaatgtgtagtcttttatccctcgccaccccaccctttccccgagtccccaaagtccaatgtatcattcttatgccttttgttgttctcatagcttagctcccatatatgagtgggaacagacaatgtttggttttccattcctgagttacttcacttatccaggttgctgcaagtgccattatttcattcccttttatggactgagttgtattccatggtgtgtgtgtgtgtggctgtttgagtgtgtgtgtatatatatatatacacacacacaccatattttctttgtccatttcttgtttgttgatgggcatttgggctggttccatatttttgcaattgcaaattgtgctgctataaaatgtgtgtgcgagtatctttnnnnnnnnnnnnnnnnnnnnnnnnnnnnnnnnnnnnnnnnnnnnnnnnnnnnnnnnnnnnnnnnnnnnnnnnnnnnnnnnnnnnnnnnnnnnnnnnnnnnctctttcttgtttgtcttaagaaagcaagagggaggcgggggagggcttttcctcttttttctttgttttgtgtgttgtcttttcttttgtttccttttgttgttcttctctgtcgcttcttcttgttgctttcttctcgttgcttgtctgctcattcttgtgtttgtctctgctttttttgtgttttcttctttctgtgttccttcatctgtttgctttcttgctcttgttttcttgtctttttcattccgttgttttctgcttctttctgctgtcggtcgtcggtcgttctgtctgtcgtcttgtctttgtttcttcttcctcttctgtggctcttttttcccttctgggcgcgtcttgcctggcttgtttgttttccttgcttggtgtttctctttttgtgacgcggtatgcttcgtcttttctctccgtttccttttttctactgttcttgtgcgctgatgcttttctctttttctgttgttttttgctctctctctcttgtctcttctgcctgttcttttctctctcttgttctggtggctgtcttcttttgtgtttctttcttgttgtgttctcccctgtcttctcttcttcttttggttgtttctctttgccgtttggttctccctctctttccgttcgttcgatgaccctgcctg

SEQ ID NO: 2032 - protein, 295 aa, Homo sapiens
  MOD_RES (109)..(142): Variable amino acid
MYHSYAFCCSHSLAPIYEWEQTMFGFPFLSYFTYPGCCKCHYFIPFYGLSCIPWCVCVWLFECVCIYIYTHTHHIFFVHFLFVDGHLGWFHIFAIANCAAIKCVCEYLXXXXXXXXXXXXXXXXXXXXXXXXXXXXXXXXXXSFLFVLRKQEGGGGGLFLFFLCFVCCLFFCFLLLFFSVASSCCFLLVACLLILVFVSAFFVFSSFCVPSSVCFLALVFLSFSFRCFLLLSAVGRRSFCLSSCLCFFFLFCGSFFPSGRVLPGLFVFLAWCFSFCDAVCFVFSLRFLFSTVLVR

SEQ ID NO: 2033 - DNA, 1363 bp, Homo sapiens
  source (1)..(1363)
  CDS (201)..(1163)
  modified_base (9): a, t, c, g, unknown or other
  modified_base (17): a, t, c, g, unknown or other
  modified_base (32)..(33): a, t, c, g, unknown or other
  modified_base (43): a, t, c, g, unknown or other
  modified_base (55): a, t, c, g, unknown or other
  modified_base (62): a, t, c, g, unknown or other
  modified_base (69): a, t, c, g, unknown or other
  modified_base (78): a, t, c, g, unknown or other
  modified_base (87): a, t, c, g, unknown or other
  modified_base (99): a, t, c, g, unknown or other
  modified_base (113): a, t, c, g, unknown or other
atccaggancagagagnaggaaaaactagttnnggggactttnctgtggacaagnttcttantccaacngtgtgtatnactgaattncagatgactgtngaggagacagtgtncaattcccaattgagaaagatgagagaaaggctggaggcccaggccataaagaggctgcttttcctcggtttttttgttgcggtgagatgtttgttttttttgtgcctgtgttgtttagtgtgccggtggtggttttggtttttgggtttgccccttctttttctcttgggttttgttcttccttttctctgttcctttctgtcgcgtgcgctctgcgtcgctgttgttctttttgggtgtgggttttcttttcccttggtcgcgtggctctttccgcctgtgtggtgggccccccgcctcccctctcccccccccgccgttctcctcttcgttctttgttgctctttttctcggttgtctgtgctgcgcctttccccccccttgccgccccttggtctcgcgcgtgcctcccggttgcttcgttttgtgcttgtgcttgtttgttgtcccgctccgcccgccccctcctcctcttcgtcctccccccttgtcttccctcctcctccgcgctccgcgcgccccgtgcgcctccttctctgtttggctcgtgtcccgctctctccgcggtcctggcgggccggtgcgttcgccgggtggttggtggcgtgtttctccgttgttcgcgttgccgcgctggtgtgtctccgcgtcgccgctgctggtctgttctcttcgtcgcttttgtctgctgttcgcacatcctaacatataacaataaacaactaagcacagttttttttattttccttcaaggaaggaaaaaaaaaagggctaccggtttaaaaagcttttttaaggtggggcccttccctaaacctttaaggggaaagccctctcgttcttctccagaagtccggggggacaaacccttttttttttgcttctattggggaggaatttttagccttgggggattttgttttgttgcccttggttgtcttcggtctgtgcgagtgccagggggtatttgtaacctaggtgacgttgttttgttctccccgacccttaaaggttgtgcgctggttttttttcacctgggtaatcactagaaattgcctgtggttgggtgggttggtgtgtttgttaaagcagggtgtttggtccctccccttgagtttctggttctttctgttttgagtggtggtttggaatttccctttcttagaagttcccaggtgatccttgagcgggtggtgccaaggctgcactttgtgaacctctgttccgcttcataccacctcgcaaatag

SEQ ID NO: 2034 - protein, 320 aa, Homo sapiens
MFVFFVPVLFSVPVVVLVFGFAPSFSLGFCSSFSLFLSVACALRRCCSFWVWVFFSLGRVALSACVVGPPPPLSPPRRSPLRSLLLFFSVVCAAPFPPLAAPWSRACLPVASFCACACLLSRSARPLLLFVLPPCLPSSSALRAPRAPPSLFGSCPALSAVLAGRCVRRVVGGVFLRCSRCRAGVSPRRRCWSVLFVAFVCCSHILTYNNKQLSTVFFIFLQGRKKKRATGLKSFFKVGPFPKPLRGKPSRSSPEVRGDKPFFFCFYWGGIFSLGGFCFVALGCLRSVRVPGGICNLGDVVLFSPTLKGCALVFFHLGNH

SEQ ID NO: 2035 - DNA, 1912 bp, Homo sapiens
  source (1)..(1912)
  CDS (201)..(343)
  CDS (455)..(843)
  CDS (940)..(1314)
  CDS (1648)..(1712)
gcaggaaggacaagccacagtccaagacagcaagaccagataatatcagagataaccagatagtgagagacaagggcaagaacataagcaacagaaaccaaggctacttggcatcatcagaaaccagttctcccaccacagtgggccctggataccccaacacaccagaaaaacaaaactctgatttaaaatcacatcttatgatgatgatagaggactttaagaaggacataaataactcccttaaagaaatacaagagagctttggcttccgtagacgaggtcgggcggaccttcgtccggggtttcggcacccccccttccccttccccggggtccgggggtgacattgcaccgcgcccctcctggggttgcgtcctcgccccacgcggactccccctcggcgcgcagctccctttcgccttccttggccggggttccctcccttccccagctgcccagtcatgggggctgctgtgtttttcggatgcaccttcgtcgcgttcggcccagccttctcccttttcctgatcactgtagctggagacccacttcgggttatcatcctggtggcgggagcctttttctggctggtctccctgctcttggcttctgtggtctggttcatcttggtccatgtgacagaccgatcagatgcacggctccagtatggcctcctgatttttggtgctgctgtctctgtccttctacaggaagtgttccgttttgcttactacaagctccttaagaaggcagatgagggcttagcatcactgagtgaggacggaagatcacccatctccatccgacagatggcctatggagaggcggtctggagggagagtaggtatggtagacttttccctgggcttggggagtaggtactgctaatgaagctgtggtggtcctggtcgttgacaagaccctccctccccccagtttctggtctgtccttcggtatcatcagtggtgtcttctctgttatcaatattttggctgatgcacttgggccaggtgtggttgggatccatggagactcaccctattacttcctgacttcagcctttctgacagcagccattatcctgctccacaccttttggggagttgtgttctttgatgcctgtgagaggagacggtactgggctttgggcctggtagttgggagtcaccttctgacatcgggactgacattcctgaacccctggtatgaggctagcctgctgcccatctatgcagtcaccgtttccatggggctctgggcgttcatcacagccggaggctccctccgaagtatccagcgcagcctttcgtgtaaggactgactacctggactgatcgcccgacagatcccatctgcctatccactgcccatgactgaacccagccccagcccgggtccactgccctcatcctccgtctcctcgctgatgtgccccgcttccttccgggtttggcgttgtccatttgtgacctgtagtctctaagctttctcaggagcagcctgggtgcagccagtcagggactggtgggtttgaatctgcatctctccccaccacctggggacccccttgttgtccaggtctccccatgtgtcagtgctccaccctcaccctgcccatgactcaccccgcttcccctctgcaggccgccggcaggaggacagtcgggtgatggtgtactctgccctgcgcatcccacccgaggactgagggaacatgggggggcccctgggcctggggtgccctcccgatctcctcgtcccgtatttctccatctccagttctggacagtgcaggttgccaagaaaagggacctagcttagccatggccctggagatgaagttactgaggctgagggtagatgggttcagttcagtgtctcctgcccagactggacatcttggtcttt

SEQ ID NO: 2036 - protein, 323 aa, Homo sapiens
MMMIEDFKKDINNSLKEIQESFGFRRRGRADLRPGFRHPPFPFPGVRGCPVMGAAVFFGCTFVAFGPAFSLFLITVAGDPLRVIILVAGAFFWLVSLLLASVVWFILVHVTDRSDARLQYGLLIFGAAVSVLLQEVFRFAYYKLLKKADEGLASLSEDGRSPISIRQMAYGEAVWREISGLSFGIISGVFSVINILADALGPGVVGIHGDSPYYFLTSAFLTAAIILLHTFWGVVFFDACERRRYWALGLVVGSHLLTSGLTFLNPWYEASLLPIYAVTVSMGLWAFITAGGSLRSIQRSLSCRRQEDSRVMVYSALRIPPED

SEQ ID NO: 2037 - DNA, 11715 bp, Homo sapiens
  source (1)..(11715)
  CDS (201)..(295)
  CDS (4172)..(4367)
  CDS (4561)..(4658)
  CDS (4922)..(5136)
  CDS (6753)..(6906)
  CDS (7518)..(7718)
  CDS (11449)..(11515)
agcagaagaagctttgcctgatctcaactgtccagagcaggtggggacacccagcaaggctggatgcaagggcagccctggggaccctgacgtaaccatggttttgtcctcttggcctctgcacagccactgagtggttagtgggtgagcaccgggcccacgccattatcctgggacactgctttttcgctgttggggccatgttgctgacagggatcgcctacggtcttccccactggcagctgctgtttctggtgggtgggatacttgtgatccccttcatctcctatatctggtgagcaagcgagtacagggcatgtacagggctgggtctgatgggctggatgtcgatgagtatggagggtccttgaagctgtgggaatgggtgggatttcccctgggagaaagtgcatgtggatgggatgagataggaaggcaccaagggcagagcctctgaacctcagcattaacctcctccccgacccagagaagaccctcaaagagatgttagagaggtggtcagaaaaccaggaggaagagtgttgaaggccaaggggttaaggccaagggaagggtcagtgttgaaggtaagaggggtgatgctgggaaagggtctgccagccttggtgaccttcttgaggtggcttcactgcagtggcagagggttgaggagtgactaggagcagaagaaattcagccaggagatgactttcttagaaagagggagaaagggatgatttatatgggcaactaagacagagtcagggaagagtatcagatgttttgagtgtaggggagtcacagacaggaacctaagagattaaagctgggagaggacaactgatggggcaaaactcggaggaataagggttgagaacaaaagtgagatgccaaaagaaagaaggttaaccttgggcaggtgggaaaagagagggacaaaacagaaggcagagagggaggtgagaagaagctgaaagaacccacgtgtgaagggttaggcagttctgcatgaagcaatgatcatatttaatcttgaaattattacatttaatcttgacccctctagaagaagtatgctactcccatgtcatgggaggtggggaggagggagaactgaggcttcagagggtggaaataacttgtctaacagcacacagctagaaagtggggcacctgggatttgaactcaggggctgtctccaaagcctctgcattttaactgtaccatatgtagtaagaatgataaaagatagggttaacagcatgggggctgggcgcagtggctcatgcctgtaatcccaacactttgggaggctggggtgggaggagcgcttgaggctaggagtttgggaccagcctgggcaacatagcaagaccctgcctctacacaaaattttaaagttagccaggcatggtggcacacacttgtagtcccagctacttgggaggctgaggtgggaggatcacttgagcccaggagatcatggctgcagtgagttatgattgtattactgcactccagcctgggcaaaagagtgagatcctgtttaaaaaaaatttcagtccagttcaattaaaaactttaatcttacatcagatccacagctttttcctggcccctcgctcaggatagtggccaagggggatgaggtctgttctgacctattgttcttcctcctgtctccttgttctgattttccaggttctaggcatgggatagggacatcagataaaatagaccaaagactgacatggcaggggctattatagtctctcagggtcctctgtagggtagatattcaaataccatcactctcgggtccattcgtgggtcttctgagcattggaatttcctaatgctcccagtgctctgtttgtgacctccctcagctcctgtccctggcagttcaccccataacctctttctgtaggggtctcctcatcctagcacatggggtgcctttaagacagcagggtccacttggccaaaaaaccccactgttccccagcctccaccctgttgtggtgggctgctccaatcaacctcctgccttcattatacccagatgagagatgggcatcattctccgggtttatgtaggccctcaaactccaggtggcacatattaaccctcctataatctctctcactgtctggaataccaggacaagcccccatgtttctgaattagcaagttccagccagagtgggatggcagatgtcctttttcaaaggcagtccccgcatctatctaaggagttctcttgaactcccctttgcctagctcgagtagatgagagttgtatggggagtgaggaggagagattcaagaccctgtcacttccatgaactggattcccagcctctattggtaggctgttagcagtgagcaccaatgtactatgggtgctgaaggtccctcttttgacctagttgtgtcccctaggctttggcagtctgggcctgtgatggaaggggcagtaccaatgatctctaatgtatctttggggttattcttttagtgtcctcaaggatagtgcctggcttccgctgatttgtactggcctccttatcaaacagtagcttggccacatccttggtgttctctcccaaacacactttgttattcatggaaaatgaataaacagcatggccaacatgagcatttgacaaatctttaagttctgcttcccttttaattataaattctaatttgtttctctcttctcacattttactataagtagtcaagagaagccataccacaccctcaacactttgcttagggacttcttctgccaaatgtcctatttcatcacttacaagttccttctttcacaaacactaaggcatgaatacagttcagccaagctctttgccattttgtagcaaggattgccatttctccagtttctaatagttcctcatttgcatctgagacctcatcagaatgtctttattgtccatatttacgtcaacattctgttcatgacctcttcaatgcatttgttacatttctcccattgtgtcctccctcccattctctttgtccctgagagttggtatccttttcttatacctgttttttcagtggacatgaggccaatcccccatctttttgaagaagtctcagtttaatggctttctttaggagagttccacagccttagagtggaaaatgatgactgattgctgaaccctggtgggagagaggaggagcagggcaggtataaggaatgaagttgtctctagtgtcttgagtgtgtgtttatggcaaccagccagagtcctggtcggggagggagtgctggtataagaaatcagcaggcacagttttattaaaaagttataccaccttaggggactgaggctgtaccagtccccaagtacatagctctgcctctgtgtcctcgggcaagccttttactccttgagcctgggagtaaaatggggataatcatactaggtccaggtttggatgaggattaaacaagactatatatacaagggcaccaagcaccatttttcacacatacgtgctttttatgccaatctgtgtggattctgacagcctgagaggatgggaaaaaacagagaggagttattctgaagtcaaaggcaatagagatgtggcgggggagagatgggacagagtagagaccttcactcacccctccattcacccaggcagagtgctgggcactggggtcagacccagggtcctgccccctcacactcctcaggctgttggggagacagatagggaacaggagaaatcccaactaagggcatgggggctctacaggaggctgtgggcatgaaggtcggagccctcagcatgcctgagcagataggggtggccccctagatagaaaaggagagagctctcagtgattactgagggcaattcaaggagactggagacagaggcagccggtggtcagggtgttacctagcagcagtggaggccatgtgaggcttagacaggggaagggctgaccaccagggaggagcagagggcagctcgaggtcagtggtggccttcaaggccctgacatctgaatcacctcgtgctggcacaggatggccacagctgaggccacgagagggccagcagggggtctctgggcatcatagaacggtgagataagagaggggctggccacgcaggattctcccggagtccccgcggtggctgatgatgaaagggaaggtgaaggaggccaagcaggtgctgtgctacgccgcaagtgtgaacaagaagaccattccttcaaatctgctggacgaggtaaagggcttctggccaggagtggggccggagcagtgggctgtggaagggccccttccctcctcatcctttcaggtgggacattggtccagagggtgcccccagtccactgcttaaggacaatggtgacagcaaaattgaaccctgccagggaaggccagaagccagctggcactttcagggacaggcaggccttgtgggtgctgtggggctggggagcaagctggggtcttggccctgcctctgactggtcctgcttgttctgtagctgcagctgcccagaaagaaggtgactcgggcctctgtcctggacttctgtaagaataggcagctctgcaaggtgaccttggtgatgagctgtgtgtggtgagtatccagggctcgctgaaagggactgcgaacaggtgcgcaggctggaaactctagggagaggatgggaatggtcaggctgcaggggaggcagcccaaggacacagatcacaggtctctgtgcttatttctctcctccgttcctaccctgacccttgctgctctgcctctgtctttattcctggctccgtgtgtgtgtgtgtgtgtgtgtgcgcgcgcgcgcgcgtgtgcacgcgcacttgcctcctggcttcatccaggtttaccgtcagttacacctattttacgttgagcctgagaatgagagagctgggcgtgagcgtccacttcagacacgtggtccccagcatcatggaggtgcctgcccggctgtgctgcatctttctcctccagcagattgggaggaagtggagcctggctgtgactctcctccaagccatcatctggtgcttgcttctccttttcctccctgaaggtacagctcatccttcccctgtggcctgcccacagccttcctgcttcccaaaacccctccccagtgccgcctgccatggccggccacctagacaccctgggaatcagccttctgcacctatagcccacccaccccacagaggccccagcacctccaatccctggagcactgctcttcctgggcggggtcccccagacagggcacccacactctctcagaggcctgaaagaggagggtgtactttccagaggacagcaggcagccttcttccaccagattccagtccaccttagaagtaggtctaatggttacatgtgaataaatgatggcaaaaatattccttcaactgctgcccaggcccacctgtcatctgtagcccctttgactgggaaatgcctgttgttccctgtagcttcaccaggaataacctgaccactgaaaaattgagtgtaatatggggctcagcactcaggaacagctcttgcatggaggcccctcctttccagaggggctcagtgccccattcctgctggcttagcactagaaaaggaaacaggaagggctggtgttatcttcagaatctcaaagagccctaaacagtggatacaccacaggtcctagagctggagcgatctgtgcagcacatgcacttagaatgactgcctgcggagccctttcacagtcgcagcaagggcaggggaggctagatccggccctgcctggaggggctccctccctttctccagggctggaattgtgtgtgtctggattaggacccttccactcccagatgctggcagtgtagattggctaacacaaaatgtggaaacaaattcattattgaatattaattgcctggtggtttttaaaaaagcaggtctacactgagtcaagcagcaatatgtaaactcagaagtgtgagagaaactaggaatggactccccggtagataaaactggatctctgatttcatcccagagacaagaaaagccaggactggaatgggagtaaggccggggcagggtcctgcagaggctgacaggcaggcaggcaggggctgaagcccccagcttcaccaggtctgaggaatgggctttccccagtttccccttcattgtgcctgtctagctggccggagaacatcctggaatgtttgggagccatcccagccattcaggccccaggaaccaaacacccccttgctctgaccaccttgcagagccccggtggtacagccctgagcaggggtcccaacccacaggacacaggcctggccctgagtggatccccagtggggtgaggaagctgcaattgggtgaggaggtggaacgaagacacagccttggaggcagagaagggggtgttgggtgtagcatgggagacagtggcctgagaggccatgggtgtcccaggggacctccccacccctgctgaccaactctgcactgcaaatgtcctgccttccagcctggctgggcctctgacaacctgccactcctctgacagaatgcctgagcctgctggccagctgggcaggtggtggggaaggctgttcagatgccttctgggaggggtcaagggagggctgatgagtggaactccttcacccaccccaggggaggatggcctcagactcaagtggccacgttgtccggccacagagctgaaatccatgacgatcttggtgctcatgctcagagagttcagcctggccgccactgtcactgtgttcttcctctacaccgctgagctcctccccactgtgctcaggtatggggtctggtgggcgagggggccatggggacatgcgcagggagtgacaatgacaagattaatgcagcaactaagacaagcattcacctggtgacaagcactgtgctaaacagaaaacataagtgatctcatttaacaccaccagaaaatcccccaaatgccatcactaaccctatttcagatgcaagaccagacagataaaggcactcgattaagggcagacagagcaagcagcagagctgggatttggccccaggcagcctgactccagcccctgccttgcactcactgcctggaaagtgtttgggccacttggaggctcagatccttccctgaggttggcgatgggagcactatcttcctgcctggctggcatcactgcctgtgtcctctccccgcacatccacataatgctgcatggtttctgcctctccccctcctcatcccccttgaaggaggcccagaagaaattattgcctacttggaatcacacaatgaggatgggacagggtggagactggagagtgtgggttttcatgtagctgctggccctgcccagcctctgaacccggcagacccctcacaggagctctcacctccactttcagggcgacaggtctggggctggtgtctctggcctcggtggctggagccatcttgtccctgacaatcatcagccagaccccctccctcctgcccatctttctctgctgcgtcttagccatcgtggccttttccctctcctccctgctgccggaaacgcgagatcagcccctctccgagagcctgaaccactcctcacagataaggtaggtgtgggagcctcctgggctgtgccagcacggggcctggctctgaagccttggcacagagagcgtgcgggacattgtccatccccgcccctctgccggagagcctgtgactcgaaggctgccatgtccgcagcagtctctccgctcctctggctgctgctgtctacctgctcccacccagcctctgccagttcccatcctgctgcccctcctgacccggactgggccatgtcgtctcctttccttgcccctgcctgcctgtctggatgggtgcattgcctttgggcataccctccaggggcactcctcccagaggctccctctcctcccagggacaggggactggcttggaactgactctgagtacatctcttttcctgtctgaactcctagttcagtcctggttttcataaaaaacccagtcttgatgaaggactctggcctcttggccccagcagcccaggaccccatttgggaactgggttccacccaacacctccatgggcacttccggcctctgatctcccaggtgtcccctggagaagacttgtcatgattggcaggaccattccttctgggttttcggccaatgaacacgctctccctggacctgaggggacctgagcgccagtgaggagcagaggttgcccgaggccctagagtgtcctctgctctgtgccacagcagtcactgcctctggcctttctctgccctcctccctaccatcttccccctgccctccctccctgctctcactggaaccacacatgctaggcactgtgccagggcttgactgtcaaaggtcagaggtcagcactccccatccttgagaaaaccatagcttatgcggagacagatgatgcaaacagttcctgctagaggactctgacagtgggatatacaggatctgtaggaacctaacaagggaagaacgttaatttggggagttggagaaaatgtcacagtgacaactgagtagggctttgaaggatggatagaaacttgccccactgtagagagaggaagttcagcgccgcacgggaagagaggataatggttatgggcacaggttccatgtgccgcaacttcctagtgtgtgcacggagaagttacctcatacctctgagactcagtttcttcatttgcaaagtggaatgagaacagagtaataacaatagctaagatgaattgagcatttgttatgtgttagaccctgttctacacatgccttatctcgctctatcctcaaaacaatcaaatgcaaggtaggttctgtcactatccccattttacaggtgagaacattggggcacagagaggtaaggccatgtagcccagccatcctctcccatgggtttttttgagaggattaaacctacataaagcagctggcacagggtctggcatgtggcaagtgctcagtaaatgctagcagtgaagatggtggaccaacttcaaagacagaaaagagaagggtctcgcaagggttgggagatggagcaggcctgattctggaggctcctggcaaagctcggctggggacctgccggagtgagaaagcctcacctcttgggaacgcagggttgggcgctgctgaaggcacaagccgctgcttttctcagcttccagaaagatgtggccctggactcatcctctgatggctctttcaggaataaggtcaaggacatgaagactaaggaaacatcatctgatgatgtctgaggaagcggccaagaatgtcattctcaatgcccagatcctgagattggacccataccctgtctccaaccctgccttgaagcaattcaataaagaggaagcaaacagccaggctccctgagggccaggcccccagaccatcttgggttggaattgagtggccaagtatggggtcatggattccaggccacaaattccaggcctagttcagtctgggggcagggtcagtcctgctcccaggccagcccttgacattaaaaaaaaatgccccctccttctgcaggagctctgctgtgattcattccaataaaggtacaatgttggtcttgagatggctgggtcaaagttgcccatgtgtggagaatgcagaggccctggcctggaggaagatgggttagacagactccttagtgtctttgtctaatcgttcagggacagtgaggagctctctggatgggggcaggggagtggggagggcaatgtctatgagagccagaggtgaagtgagggcaagactgtgcctgcacaccaaccatacccactagcccatgcatccgccagcatggcgagtttccacctgaagcacaggctgaggacagatttcaaagctccattttatgcactagtcagggcagggatggaatgtaaaggaacattgagaacttctctcatttgtcccattgcatagggctttctcaccatctttctgctgatgctgcaaataaacatggtcttgggaattacccaaatcggtccacatccctggggatgctttcctgatgactccaccctagctgacctctggcctccaccactctgaggataagcccccataccccagctcacaccctaactgccctgaaggtgattctgcccttcccagctggcatgggggttctgccaggcagggcccaggactcctcaaccagactgtgaagtccttgggtcaggccttcggcactacctcctctctccctgtcttacctcctccacgcttgcctagtttattggaagatcatgggcttgcagagaatagctctggttcgactcctcatagcctctgagggaggaagacagataagcaagtcagttctcatggagccagggcagcaaggccatggatctcccaggcaggttggagtccagtgaagcagggagtggcctccagcattcccagcactctggcccagcacactgctttgcgcatgtgctcccaagctttgggacaccaagaagctggtgtccatgcctttccctttcagtgtcattttctgtgcgactgagtttcctaggagggtctccaaagtggggtttgaagggccagaaagtgatctcacaaagtgtctgttcataggaccacaggatgctcgaaaagtctctgttgctctttctggcagaggcctgtgtgtgagctgtgatgccaacatattagccttatttaaacacctctcctcaagttactttgccaggaatcacctagtgccatagggaacaggaggaagagaggggtcaggacagaaaactgatggggcagtgtgggtgtgaaggagctggttgtacaggctgtggctgtcagcgagaccaactgcactcctacacgctttcaatttttcttaggtggccaaggcttgtcagtcagttccagataggacctacctagttgtttactgaatcaatggctaataatatttagagtttgacgttatgtattttactagactagacccatgctgtcccatacagcagccactaaccagacgtgggtatcgagggcttaaaatatgcctagtctgggaggctgaggtgggcggatcacctgaggttgggagttccagaccagcctggccaacatggtgaaaccccctctctactaaaaatacaagaatttttagtgggcatggtggtgggcgcctgtagttccagctactccggaggctgaggcagcagaattactcgaacccgggaggcagagcttgcagtgagccgagatcgcgccattgcactccagcctgggcaacagagcgaggctccgtttcaaaacaaacaacaacaacaacaacaacaaatgttgctagtctgatttgagatgtgctataactgaaaaacacactggatttcaaaggcttagtacaacataaaacaaaatatctcaatatttttaatatagatcacatgtaaaaatggcagcattttggatatattgagcagataaaacattaaaattaattgcacctattcttattaatttattttaattttacttcaagctctggga

SEQ ID NO: 2038 - protein, 341 aa, Homo sapiens
MLLTGIAYGLPHWQLLFLVGGILVIPFISYIWILPESPRWLMMKGKVKEAKQVLCYAASVNKKTIPSNLLDEVKGFWPGVGPEQWAVEGPLPSSSFQLQLPRKKVTRASVLDFCKNRQLCKVTLVMSCVWFTVSYTYFTLSLRMRELGVSVHFRHVVPSIMEVPARLCCIFLLQQIGRKWSLAVTLLQAIIWCLLLLFLPEGEDGLRLKWPRCPATELKSMTILVLMLREFSLAATVTVFFLYTAELLPTVLRATGLGLVSLASVAGAILSLTIISQTPSLLPIFLCCVLAIVAFSLSSLLPETRDQPLSESLNHSSQISLGNRARLRFKTNNNNNNNKCC

SEQ ID NO: 2039 - DNA, 1351 bp, Homo sapiens
  source (1)..(1351)
  CDS (201)..(1151)
  modified_base (1003)..(1102): a, t, c, g, unknown or other
ctacaggagcacaccaccatgcctggctaattttgggacaggatcttgctctcacccaggctggagtgcagtggcacaattacagctcactgcaacctctgcctcccaggctcaagccatccacctcagcctcttgagaagctgggactacaggtgtgcaccaccacatgtagctaattttttttttttttttttttgagatggagtttcattcttgttgcctaggctggagtgcgccgccggtttgttttcccgctttgtggtggtgttttgtcgtcctgcggtgttgctttgtgtgtgggattggggtgttgtgggtgttgtgtggggtggtttttgggcttagctgtgccctcccgcttcctgtgcgccgcgccctgtttccccggcggtttttgcctttgtccggggtgtctttgtttcccgttctttcgccttttcctccctgtttcttttctccttctttgtttcgtgtcgccgtctcgccctttgtttctgtttttcttccgcctctggctatcttctcttttttcttctccctcccttcgcctcttgctgtgtctccgtttccccttccccgttccccgcttccgttctcttcgtctcccgtttgtcttttcccccctctctctctctctcgttctctccctgtttctcgccttgcctttttcccccgccctctttctttgcccctcctgcctcttgtctttcccccctgtttgtactctctctctgcgtcttcgcgcccttccacttctccgcatttgcggactcgcttcttttttctcccgccccctccagctttctccctcgtccgtgtgctctcgcctatcttctccctcgtccgctccgacgcccgcttctctgcgtgttcctccctcttatctctttcgtctctctcttttccgccctttccttgcccctgtcccgcgcacgtctgcttttgtgatgcacctctcttcttttctagcctctcttctctctccctctcttcttttcttannnnnnnnnnnnnnnnnnnnnnnnnnnnnnnnnnnnnnnnnnnnnnnnnnnnnnnnnnnnnnnnnnnnnnnnnnnnnnnnnnnnnnnnnnnnnnnnnnnnatggtgcgatcttggctcactgcaacctccgcctcccaggttcaagtgactctccttccttagcctccccactagctgggattatgggcatgtgccaccacgcctggctaattttgttcttttgtttttgttttttgagatggagccttgctgtgtcacccaggctggagtgcagtggtgcaatctctggtcactgcaacctctgcctaccaggttcaagcaattctcctgcctcggcctcccaagtag

SEQ ID NO: 2040 - protein, 316 aa, Homo sapiens
  MOD_RES (268)..(301): Variable amino acid
MEFHSCCLGWSAPPVCFPALWWCFVVLRCCFVCGIGVLWVLCGVVFGLSCALPLPVRRALFPRRFLPLSGVSLFPVLSPFPPCFFSPSLFRVAVSPFVSVFLPPLAIFSFFFSLPSPLAVSPFPLPRSPLPFSSSPVCLFPPLSLSRSLPVSRLAFFPRPLSLPLLPLVFPPCLYSLSASSRPSTSPHLRTRFFFLPPPPAFSLVRVLSPIFSLVRSDARFSACSSLLSLSSLSFPPFPCPCPAHVCFCDAPLFFSSLSSLSLSSFLXXXXXXXXXXXXXXXXXXXXXXXXXXXXXXXXXXWCDLGSLQPPPPRFK

SEQ ID NO: 2041 - DNA, 21581 bp, Homo sapiens
  source (1)..(21581)
  CDS (201)..(304)
  CDS (11453)..(12511)
  CDS (15724)..(16034)
  CDS (21347)..(21381)
cacctgggctaagtgagaggacgcccgcccggggaagcagccagcggagggcgcaggaaggaggagctcgctggatgggggcgtcttgggaagggtgggaggagcagaaggagcacggctgaggaggatgcggatgggggcctgagagcctgtttgtccagtgagcaggggaggggagggctgcttggagaaaatgaaggatggagggcagggagtgggtaggggcgtctggcccgggcaaggccgctgccttcctggagcaggacagtcagggagctcactgctttctggaggaggaatgtaggtgagaccgggacaggaaggggtatgggtgcccagaaccggctgatgtgaaggagtcccacttagggatccaggaacagtgggaatagcactgctgggggccaagaggggcacttgctccatgggcccaagcagtctagacaccttgggggatgagggagcctcccctggtgtcaggagagcctgggggtcccccacacacagtgagggaaggggaaaacccacagcacttgcctcaaggctgcaggttttgaagaccttcagaaatttccctgtagcagcccctggaggaggcctgtggggctaggtcaagccaaggcctcggagtctgaacagttcgatggattcggagtctggctgctcctgggtggacagcccaggaccccaagtctgagctcctatcggagagagggacccagcctctagtcatgaggcctgtgctacctctgggtccttttgttgagaggctgcccctctccagccttagtttctctgtccagagggttccttgctggtcagcagtgcagctcaggtcctttttctgtgccccatgctgggtgactatagctcgttcacccaacctctctgggcctaagagattccccctcctcagagcagctgtaagtctcagctccacagaatactttctttaagaattgctttttcaggccatctgtgggagctcacacttataatcccagcgctttgggaggctgaggtgagaggatggcttaagccgtgagttcaaggttgcagtgagctgagatggtgccactgtactccagcctgggggacagagcatagaccctgtttaaaaaaaaaaaaaaaagtctgggcatggtggctcacacctgtaatcccagtactttgggaggccgaggcaggcggatcacctgaggttgggagtttgagaccagcctgaccaacatggagaaaccccatctctactaaaaatacaaaattagccgggtgtggtggtgcatgcctgtaatcccagttactcaggagactgaggcaggagaatcgcttgaagccgggaggcggaggttgcagtgagccgagatcttgccattgtacttcagcctgggcaacaagagtgaaactttgtctcaaaaaataaaaaaagaaaagaaaagaattaggctgggcacagtggctcatgattgtaaccccagcactttgagaggccaacgcaggaggattgctcaagcccaggaattcaagaccagcctgggcaacatagtgagaccttgtctctacacataataaaaaaattagccaggcgtggtgttgtgtgcctgtggtcagggctactcaggaggctgaggtgggaggatggcttgagcctgggcagttgaggctgcagtgatggctgcactgcacttcaacctggggacagagtgataccctatctcaagaaaagaaatagttacttatttcattctgatcacattttccagtacaaatacatggaggtcccaagtgccaaagttacaaaaaaaaaaaacagtttctgttcagttttggaagacatgtagggactttttctttaaacactttggaccaagttggggagttagcctgcattgagggaggtgacccagttgctaagagactgggaggccagccagggatgaaaactttgcctgtataatctgtggtcaccactgggtgcctgggagttacccacggtggacaaagggcaagagcgctggttttggagtcagatagatgtgctctgccctcccgcctccagggctgggctcccaggttggctgtggatccagagagttgtgagggagaggtaaaatgtgtgtgaaagttcttggtaaacacccagccactatatattatgagtggtagcacctaatctccttaatgatatttcaggtgccatattgggtcatcctcactaaagacccttcaagagggttttcctccaatagccccagtattaacattggtctggccttattatttgtatctaatggggttagactttcccttccatgctgagaaaaagttgtctttaagagaatgtgctgaacaatcagggcccagaaaggcaacaacgaatattttgcatgccaagaaggaggcaaaagaggaagtggaattgtacccaaataatgcttataataggtgttatttagctgagctgtaagctccaggagggcagggtattaatatattgaggtgttggctgagcactgtggctcactcctataatctcaacactttgggaggccaaggtgggaggatgacttgagaccaggagttcgagaccagcctgggcaacatagcaagacctcgtctctacacataatttaaaaaaataggcatggtagcgtgcgcctgtgattcccaactactcaagaggctgaagaaggatcaccggagactgggaggtcaaggctgcagtgagctgtgtttgcaccactgcactccagcctgggggacagagcatgaccctgtctcaaaaaaaaaaaaaaaaaaaaaaaatcctgtggtgttaccattggtatgaattccctgggctgttagttctgcgagggcagtggtttaaatggctctgtcactgaggaagctgcagcgcctggcacataggaggcctaaagtaaatattcttggactgtcccagggcctaagggcccttggaagtcactggtgaatttactctctcctttgacatttggagaaacagggccaagaggggaggggacttgtccaaggtcacacagggattgagtggctgagtcaggacgagaatcccacagaaacggcagagccagcactgtgccagagccaacacctggcatccatggctttgttttgcttccacaagagcccaagaggcagctattttaatcctctgattccaaaaggaaacaagctcagagaggttgagggactgttgcagagtcacacagcaggtgaattccagacccgaaatttcatcctcacataaaaatgaggcctgtggcgtctcttgaaacagcctgccggagagcctgcagagattagtggaggatgtccaccaccagggcagcagtcttctccagttctccaggctcactacctggctggcttccctccaggctggatcttcctaggccctgtgggcatttgtgtgggtgagcccgttggggcagggagcctgtctgcttcattttctgtgtgccccagcacacagaatgcctgggtagcgttgaggctggcatatagtataagcactgagtgaaatctgtgagatgggggtaacccagggctctccctctccataagcccattttccaccacctccctgcagcctggtctgttttgccccacgggtgttatgggaacctttgacagtgtgtatccttggagagcaggctggggcttgcaagccttcgttaaggagagaggtgaggagggctgaccttgagttgaggaatatgaattgggaggggtgaggaagtggaggggaggggaagggaggaaggagcggctcaggctgacagaggcactcccactggagccctggagatcgcacttcagaggttcagccaacccagaagactcccaaaccttctgcaagacatgtccaggccagaccatatgccatttggatcacctgctaatttggttcaccctcttgtgccctcgtgctctccagggcttctgagctgctggagttgaggccccttcccctgggactgtcactgcttagccacatctcttgggcctgtgggtaagcaccaatttacagggctctgtgaattcaaaacagttactctgaatggtctttgctaagaacaatttaatgattaagtaaggtcagtgtccttggaagtccaaactctagccagatttccctggtctacacccctagggataaggtaaatgtttaagcacacagtgaacttcctgaggcccccaaatctaatggaactagctattgagggctaaaagaggatggtttttttagaaaactcgaagcaaatctctcaggctggggatatttcaaagactactactattattattaataacaattgcaatatttgttgagtccctaaatgaagctaaaactttgttctaataaatttaatctttacagcaacctatgaggtagataatattgtcattcccatgagggagctaaggatcagagaaggtaagtcacttgtctaaggtcacatagctagcatgttatgcaatcaggagtcaaacctggtttgtctgaatctgaagtccatctgctctgtgcacttttataccgtctgctttttcctttattcctaaccttcttccattctgattcccactgagtagtggacaggaaccactgaagtttgcctgacaccatcaaccaggccctagtcacctggctttgcctttgccctgctgtgtgatcttaggtaagtcaaacttttcagctggccctcggtttccccgtaagtctcatgcagaggtgaatggtgagctgcttgctgcagcagaggcctggctaggaaggcacacagtttagcatggatttcaccactatgggagtggtgaagttggggaggagaggtgtgggaggttgtctttagccccaccctctggtgacatcacacaagacacccccagtccctggaagccccgcccctagtgcccctcatctgtggaagtgctcagcatctggtgaatttgcccagtcccatagtagaggtcaccagcccccaggcttgagagaaacccccaggtacccagtgcaatttgccagacttggaggggcccatggaggtgggctgggctgagctgcctgaatagacagggcccagcagcctggtgggcacacgactcagaggctgaccactcagaggatgccctgatggtgccctccggatatccatcctcatcctgctggctcaggcttgacccctgcccctgctttttcctttcccctggatcagagtccctttccatggagtcaggaggtggaaactaattctgaaaacagacctacttaggtggagtgaggcctctagctgaggtctaaagaaaatagggcagcggggtctctgtcatcctagcatggtgcctcaggttttgtccatagggcccattatatctgggggagggaggtataagcgagcgctgtcactcacctaaggaggtggcttgagccagggcctccctggagaagatcaggtgcaagcaggtagccagcaactgagggagactgaattgctagaagcctaagaaagtaatttataagaaagagcctggttgcctgctttagaccaggattttgcaaagttgttctgtaggatgcagacaagtgtgcctggagcagggcagcagtagtgtctgcaagcatctacagcccagtcctggctccacctccctcccccatcctccaaccttgggtaaggagcttttttttttcctttcttttttctttttttttttttttagagagtctcactttgtcacccagactggagtacagtggcacgatctcggctcactgcaatctcagctccccgagctcaagcgattctcctgcctcagcctcctgagtagctgggattacaagcatgcaccaccatgcccggctaatttttgtatttttagtagacatggggtttcccaatattggccaggctggtctcgaactcctgacctcaggtgatccgcccacctcggcctcccagtgagctgggattacaggtgtgagccactgcgcccagctgggagcttttgacttctctgaatttcattatccgcaacaacaaaatgggcagaatagtacttacctcccaggcaagttatgagagttaattgcaacaggactgtaaagagtgggcatatagtaaacactttctacatttaaactggcttttttttttcttcttgagatggagtctcactctgttgcccaggcttgagtgcagtagtgcgatcttggctcactgcaacctccgcctcccgggttcaaggccttctcctgccttagcttcccgagtagctgggactacaggcacgtgccaccacgcccagctaatttttgtatttttagtagagacggggtttcaccatgttggccagaatggtctcgatctcttgacctcgtgatccacccacctcggcctcccaaagtgctgggattacaggcgtgagccactgcgcccggcctcaagtggctttataatataattattactacggaaggaatccgtggtcacataagcttggcaaatgttgattcaacaaagctaagccaacttctttgctgcaggacttcttagagctttttttttttttttttttttgagaaagggtctcactctgtcacccaggctggagtgcagtggcacaatcttggctcccggcaacctctgcctctgaggctcaagggatcttcctgcctcagcttcccaagtagctgggactacaggtgcacaccaccacacctggcgaatttttgtattttttcatagagacagggttttaccatgttgcccaagctggtttcgaactcctgattgcaagtgatccacctgcctcggcctcccaaagtgctgggattacaggcatgagccatcgtgtccagcccttctgagagtctttaatgtgctgttatatcttgggaagttccaagagtgggatatggagcacaggactggacttatcagatcacaggcacccaggagctaggtgtccacagggcacagccatcgccatcattcgctggtctttgccgcagtagtggaatagaaaccttgctgggtgggaggactctggggaaggccttccagtttctgggctctgctttcctaagtgtaaaacaagagagttgcccaagatgctttcagaggtcttttctggtccccccaaggttctcagttgggaagacaaagttgtggacaagagtgggggccagattgttgaggttgaaaccatctcttggggagatggagaaatccagaactggctccccaaccagcaaggctggccaagggaggtcttgtgctctggatggaagtggccccgtcaattagtgcagcagcaatgtctgcttcctaaatctgccctgtgccaggctcgctggggaatagaagagtcctgcacatgcctgttgtcctaagtagcagcccctgtgcagcagtgtaacgactcctgcttccccactggactaggaaagactggggagcagggctgatgccagaatcctaatgcaggaggagcttaggaatgcaaatcaggctctggagatgtgggcttgtgggggtggggtcgtcttgatgctgcccttgcatagcaagcactctgcatttacttggactgtgtgtgacttatttgattggttttgggggtgatcacagtgccactgggggcagagaacatgaatgctttatcctgcctgaatctcttttccttgtctggtgactggtgcagaggtagtcacaataaatatctgatgaacctgaacactgagtccaataagtaagcttggagggaatttatttggcaggcagggagggattgtctggcaggtttttcaataactatttgagttaatgaataacacaatgaatgacggtaagcctgaattatgtaattgaagccaggtaaaacagtataaaattaggaaacgataaatagcccttgccaccttgtgttgcaaagtgcattttagggtagtggttaagagcacagtggctcacatttgtaatcccagcactttgggaggccgagtgggagggtcgcttgaggccaggagttcgagaccagcctgggcaacaaagtgagaccctgactctataataaagtaaaaataaatttaaaaaatcagctgagcatggtaacatgtacctgtagccccagccacttgggaggctgataggaggattgcttgagtccatgaggtcaaggctgcagtgagctgtgattataccactgtgctccaacctgggggacagagcaagacgctatcttaaaaacaaaacaaggctgggtgccgtggctcacgcctgtaatcccaacactttgggaggccaaggtaggtggatcacctgaggtcaggagttcgagaccagcctggccaatgtggtgaaaccctgtctactaaaaatacaaaaattagctgggcgtggtggcgggcacctgtaatcctaggtactcgggaggctgaggcaggagaattgcttgaacccaggaggcggaggttgcagtgagccgagattgagccattgcactccagcctgggtgacagagcaagactctgtctcaaacaaacaaacaaacaaaacacacaaaaaaacagacttgagttcagagcatgcctctgccatctgctacttcctggctaggtgggtgggcaaggcacttaacttctctgtacttcagtttccttacctggaaaatgggaataatgatagtgtctgcctctcagggttgctgggaagcgtctagcaggtgctgtgtgagcatttgctatgatttgtttttgtttctatatcttttgccagatcatgacattcctgagggcagggatcaaatctttcactctgttctttgtcccatccagcacagggtctgaggcaaagaagggctcagtaagtgtttgttaaatgaatgaatcaaggttaaactgtgtaacccattataggtcaggggaaagtgggattgggggagcagtaaggaggccccagaggtggcagcttgtagtggtcttaaaggatttcagtgcagggaaaggaaggtggcacagggtgtgacattggggttaggtggggaataagggtagtaggagcaggtcatgtgggccttgaatgccagggtaaggggttatattggatttatttggaactagcaaccatgggcagttgggggagggcctggagaggggattttgagagtgggggtgtggttcatcagttgttaaatggggactttcaggaaaaaagtggtcttttgagttgggcctggaaagatatgaagtgttatcagaatggtgtcatgttgttctttctttttctttttttttttttttgagacggagtttccctcttgttgcccaggctggagtgcaatggtgcgatctcggctcaccgcaacctacgcctccttggttcaagtaattctcctgcctcagcctctggagtagctgggcttataggcaggtgccaccacaactggctagttttgtatttttatttatttatttatttttgagatggagtctcactctgtcgcccaggctggagtgcagtggcgtgatcttggctcactgcaagctccacctctcgggttcatgccattctcctgcctcagctcccgagtagctgggactgcaggtgtctgccaccacgcctggctaattttttgtattttagtagagatgaggtttcaccgtgttagccaggatggtctcgatctcctgacctcatgatccgcccgcctcggcctcccaaagtgctgggattacaggcgtgagccaccatgcccggcctagttttgtatttttagtagagacaggatttctccatgttggtcaggctggtctcgacctcccgacctcaggtgatccgcctgcctcagcctcccaaagtgctgggatcacaggcgtgagccactgcgcccggcatggtgttctttcattcagcaaacattgagtgccagctatttgctaagcaccagggattcacaaaataatgagacaaactgcctccccttgatgagctcacatgaacaatcatgagaaatgtgaaaatcgtcaaaggatggtctgatgataagcactcaagtggaggggtcatcgtaggaggttcaggaggccagggaaagcatcccagaagaaatgtttttttgtttgtggttttttttttttttttgagacggagtctcgctgtcacccaggctggagtgcagtggcgcgcactgcaggctccgccccctgggttcacgccattctcctgcctcagcctcccgagcagctgggactacaggtgccccccacctcacctggctaaatttttgtatttttagtagagacggggtttcaccgtgttagccaggatggtctccatctcctgaccttgtgatccgcccgtctcagcctcccaaagtgctgggattacagatgtgagccaccgcacctggccgctgtttgtttttttaagagacaggatctcgcttgagatcaagcttgatcaagcttgagagtagtagtgtgatcagagctcactgtacatcaaattcctgggctcaagggatcctcctgccccagcctctccagtagctgggactacaggcacatgccaccacacctggctaacttttttgtagagataggatctcactacattgcccaggctggtcttgaactcctggccccaagcaatcctcctgctctgacctctcaaagtgctgggattacaggagtgaggccgcatgcctagccaagaaatgggtttttgaggaatgaataggggtttgcctagtaggcaagatgaggaaaatgtctcaggcagagggaacggctcgtgtaaagctacagacatgtgaaagagcagtccaggggttggtggggctgtgtctggatttgaagtgcactgtggttgtgcaacaagactggagagggtagcagggaccaggtcatgcagggtaatggagggtcagtaggggaccctggccactcttgaggagctagataggtagaggcagtgggtctattagcaaggtcattattgccaccagttgaacactaatggtggcatgaacacgggctgagagcgcctcacccctctcatgtgtttcacatggccagatctgttctttaggagagaaaacagctggtgctgctgtgtggagcctgggaccggaaaggaaattaacaagacagggagccttattagttaatacattcctcaaacatttattgagcacctactatgtgtcaggcactgttctaggtacctggaatacatcagggatccttgctctcatgaggtcagagatgaggaattccataggatgagtcttctgttcttaaaccgagtgtaaggataaggctgtcggagaggagggagtaggatttgggcatcagagccccccagctgctgctcgtgggggtgaggacaccaggcccctgactttgctctggtctctctcccagctccctgcccaggcccacagccatggccatggcccagaaactcagccacctcctgccgagtctgcggcaggtcatccaggagcctcagctatctctgcagccagagcctgtcttcacggtggatcgagctgaggtgccgccgctcttctggaagccgtacatctatgcgggctaccggccgctgcatcagacctggcgcttctatttccgcacgctgttccagcagcacaacgaggccgtgaatgtctggacccacctgctggcggccctggtactgctgctgcggctggccctctttgtggagaccgtggacttctggggagacccacacgccctgcccctcttcatcattgtccttgcctctttcacctacctctccttcagtgccttggctcacctcctgcaggccaagtctgagttctggcattacagcttcttcttcctggactatgtgggggtggccgtgtaccagtttggcagtgccttggcacacttctactatgctatcgagcccgcctggcatgcccaggtgcaggctgtttttctgcccatggctgcctttctcgcctggctttcctgcattggctcctgctataacaagtacatccagaaaccaggcctgctgggccgcacatgccaggaggtgccctccgtcctggcctacgcactggacattagtcctgtggtgcatcgtatcttcgtgtcctccgaccccaccacggatgatccagctcttctctaccacaagtgccaggtggtcttctttctgctggctgctgccttcttctctaccttcatgcccgagcgctggttccctggcagctgccatgtcttcgggcagggccaccaacttttccacatcttcttggtgctgtgcacgctggctcagctggaggctgtggcactggactatgaggcccgacggcccatctatgagcctctgcacacgcactggcctcacaacttttctggcctcttcctgctcacggtgggcagcagcatcctcactgcattcctcctgagccagctggtacagcgcaaacttgatcagaagaccaagtgaagggggatggcatctggtagggagggaggtatagttgggggacaggggtctgggtttggctccaggtgggaacaaggcctggtaaagttgtttgtgtctggcccacagtgactctctgtgcacgactcaactgccaagggcatcactggccaattcttggatttagggattggctaggagttgctggggtccactcctgggcctgccccagctccttgcccagggagagggaaagagttaacggtgtgggccactccagcttgcccttccactgccactcactggggtgaggctgggggtcagcttggtgaggattggggcttctagattgtctaggcaggaggtgaaacttaggccagagtcagatttgagctgagccaggggaggccttggcaacctacttctactcagatttcattgctggatgcggaaggggtaggcccaaaatatatacaggatcttactgtcccttgaagcccagccacaagtgttggagctgcagagagaccccaaaggtagtagattgtgccagatacaaatgggtcccatccagtgcttcatactccttcagtcactatcccagacagtgagccccagatctcctagctctggcttctgtgtcccacacggcctgttcccagcttctctcctggttcccttgttacggattcatttatccattcagtgtttcctgggcctctgctcagaggcaggtcaccactgggccctgtggatcaatgcaagatgacaaaggctttttttttttttttttttttttttttttttgaggagtttcgctcttgttggctaggctggagtaaaatggtgcgatctcggctcactgcacctccgcctcccaggttcaagcgattttcctgcctcagcctcccgagtagctggggttacaggcatgcaccaccatgcctggctaattttctgtatttttagtagagacggggtttctccatgttggtcaggctggtcttgaactcctgacctcaggtgatctgcccgtctcggcctcccaaagtgctgggattaccggcatgagccactgcgcctggccgacaaaggctttgatatcagaatgaactgtcaagggaggtgctggagagggattaacctgtgctgcctgggaccctcagggtcttaggttggggagtgtgaataggagtttgcagatggagaataggaagggcattccaggcagagggaaacctgtgcagagaccaagaggtgtggaaggaaaagtggggttggggctgggtggtctggattatggcctggatgcaataaagtactgtgacagtagccacctctttgttttttgtctcctgtttccgggaggggcccctgctcacattactggaggttttccggaggaagctggggcccctgggagtggacacagggtgcagggagcagttcttgttttatctttgctgggggatggggttggggccttatataccatatctatatatacaaaatttgtttggcaagggagtgggcggcagttttattactaaagttttataagtagttaaaataatgtgtttaaaatatgataatcccactttatgatctgacaaagactttttttgtttggtttttccttcaattaaggagggtttttttgttttgtttttagtggagggggcaggggcgtgcacactccaccacacatattgagcctcgtcgcatgcgcaccgaagaagtatgttaacttttataatattgctttttccatagtacacagcaatatatatacaatgaaggaaaattgggaagataagaaaacccaaattaattagaaatatcacttcactgctgaaatatcatgggggaccttatgaaatacacacacacacacacacacacacacacacacacacacacataaaatatgtgtatataaataaatattttgatataggccaggcatggtgactcacgcttgtaatcccagcactttgggaggctgaggcaggcatatcacctgagggcaggaagttgagaccagtctggccaacatggcgaaaacccatctctactaaaaatacaaaaattagccaggcgtggtggcacacacctgtagtcccagctacttgggaggctgaggtggcaggatcgcttgagcccaagaggttgaggctgcagtgagctgagactgtgccactgtacccgagcctgggtgacaaagcgagatggctctgtccaccatgaagacaggctctggctgcagagatggttgaggttcctggctgacctgctgcagactgggcaagaggtggctgagcttctatcctccctccaccaaaaaaaaaaaattacaaaatttttggccgggcgcggtggctcatgcctgtaatcccagcactttgggaggctgaggcaggcgtatcacgaggtcaggagttcgagaccagcctggccaatggtgaaaccccgtctctactaaaaatacaaaaattagctgggtgtggtggcgtgcgcctgtacttccagctactagggaggctgagacagaagaaccgcttgaacccaggaggcggggctgcagtgagccgagatagcgccactgcactccagcctgggcgacagtgagactccgtctcaaaaaaaaattttttttacatatacaatatgtaaacattacgtataatgtacatatattccatctatggagattgtggttagggacggaaggatgggtgggggtgccaacatttttgcatttccaaggggttttctgaattcacaaagtactttcacaacctcatttgatcctctttaaaatccaaggcacagtaaacggtgaaagcaggactgaaatctagttcctgaccccaaattttaacctcttcaaaatcctctcccatgtggcttcgtagttacgcttacattaaaaaaaaaaaattaccaaagttgttcgcacactcgagtgtctggtaaccacttaggtcgaggacccctggtctggagtcgacgggcctgatctcggctcagccacttccttctgggggtgatcgcgaagattcagcgatgacacgaacaaattcctaagcccgggaaatactgtaagaaattttcaatacagcaaaaagaaaatgtacatttctgaggctgtcgagaaccgttcacacagcagcttccgaatccgctcttgaaagagcggatcagaaagaacacgcactcctccgcgcagggaaatatgccgcacgcactcaagggaccggccgcgaaagttagtgcgtgggcggggcacagcgaagggggccagggccttgccggggcggggctggcgcccggggcggtcgcgacgtagccccgcccccagcgttggcgcgagatccgaacgtcggcggccgcggttctggcgttccctgaggcgccgggagcctgcgccggcgtcctgccggcttcgtctcctcagcggccatgaggcggacaggccccgaggaggaggcctgcggcgtgtggctggacgcggcggcgctgaagaggcggaaagtgcaggtgggacgctgggggatgagagggcgttgggaaccaggtagggcctggaggcgtaagacgggaggagtttgggggacacctggagatgatgaaagcgaagtcggggacagagaagggaacagcgttggggattcacaggcgagagggattgtggtctgaagaaggttgaaaaacggggcttggggaggatgggagggacggaaggaaagagcgtgctgttggggggtctggaggagcggtgcgcagggaggggcggcgaaggttcaggtgtgggagaggcggagggaaagttcgctcggagcagttgaactgaccaggctccctaggaggccacagtccctgcgagacgtcctagtagaggctggagcattgggagatggatgcgaatgcaaattggggaaattctcaccccggggtctgtttccacccaatttgccaagttgcaggccaactacctgcccagaaccggtaactttgaggggaaaagtagaagctatgggaaggggagctggcctcctatgtactgagcagtcactgggtgccggatactgcattagatactgaatatgcgttatatgtgtcgtcattcttgctgggaatgaggaaactgaggttcagtaactaacctaggcccgcctaactagaaggagctggaaatcacattcaggtctgtcacctaggcaagatgctcttcagtcactgtaaagaaacaaaagtgcgacataataatcattcatgtttattgagcattttatgctggtgctaagtgttttaggtatgttaccttgtttggtacaattctatatggtagatagtgtaatgatacccattttacatacggaaaacaggctcaaaacagacactaggggcaagattcttgctctcaggttgctcacagtcttatagggaagaaaagaggtgtataaataataacaacaatacctaacctttattgagtgctttctatgtgtcaggcattttgccgagactttatacactttatcaatggcaggtactcaccaaaattcagtaaagtagattttgtcattatcctggttttatagataagaaatttgatcattttattattattatttattattattattttttgagatggagtcttgctctgtcgcccaggctggagtgcagtgacacaatctcagttccctgcaagccccacctccggggttcacgccattctcctgcctcagcctcctgagtagctgggactacaggcggccaccaccacgcccggctaattttttgtatttttagtagagacaggttttcaccgtgttagccaggatggtctcgctctcctgacctcgtgatctgcccgcctcagcctcccagagtgctgggattacaggcgtgagccactgcgcccggcatattattattattgttatttttgagatggagtttcactcttgttgctcgtgctggagtgcagtggcgcgatctaagctcactgcaacctctgcctcccgggttcaagcgattcttccgcctcagcctcccgagtagctgggactacaggcgcccgcactacgctcggctgatttttgtatttttagtagagacagggtttcactatgttggccaggctggtcttgaactcctgacctcaagtgatccgcccgtctcggcctcccaaagtgctgagattacaggcttgagctaccgtgcctggccgattgttttattttttcaaaaattatcaaaatggccgggtgcggctgcacgcctgtaatcctagtactttgggaggccgaggcgggcggatcacctgaggtcaggagttcgagaccggcctggccaacatggtgaaaccccgtctctcctataaaaaatacaaaaatttgctgggcgtggtggcaggtacctgtaatcccagctactcgggaggctgagacaggagaattgcttgaacccaggaggtggaggttgcagtgagccgagatcgtgccactgcactccagcctgggtgacagaagactcagtctcaaaaaaaaaaaaaaaaaaatcaaaatgtgcaatagctatttattactccttgaattaggaataagccatttgtaccctttgaatacattcttgaatgacatgggatgcgtgggaaacttgtataccactttgatttgttagttaattttggagacaggcctcagtccgtcacccaggctagagtgcggtggcgtaatcacgactacctacagcctcaacgcccccgggctccaggtgatcctcttgcctcatcctcccgagtagctgggactacaggcatagtgccacaaagcccagctcattttttgtattttttttttttgtagagacggggtttcgctgtgttacctaggctggtcttgaactcctgagctcaagtgatctgcccaccgtggcttctcaaagtgctgggattacaggtgtgagccactgcacccagccaccagtttaatttagaaagagaacagaaatagaattaggaagagttcaggagagcgagaaagggaatattccacagggaagaggagagccaatatttgtctctctgtctataattctgttttgttgttgttgttggtgttgttgttttccgaaatggagtcttgctcttgttgcccgggctggagtgcagtggtgcgatctcagctcactgcaacctccacctcctgggttcaagcagttcccctgcctcagtctccagagtagctgggattacaggcatgcaccaccttgcccaggtgaatttgtatttttagtagagacggggtttctccatgttggttaggctggtcttgaactcccaacctgaggtgatccacctgcctcggcctcctgggattacaggcgtgagccactacgcccagcctaatcttgttttattgtttgttttgtttttttttttttgagatggagtcttgctctgtcacccaggctggagtgtagtggcatgatctcgggtcactgcagcctctgcctcccagattcaagcgattctctgcctcagcctcatgagtagctgggattacaggcgtgtgccaccatacctggctaatttttgtatttttagtagagacagggtttcaccatgttgaccaggctggtctcgaactcctggcctcaagtgatccacctgcctcagcctcccaaagtgctgggattacaggcatgagccaccgtgcctggtctgtctataattcttatacccccaaatcctgcctttttccctggcaatgttatggtgaaaacatttgtcttgttgatgtagtacatgacagttatagaatcctccaggatctctaggcccttaacttattctgatttctagaggcctggaccttatgaccatactcactaacaccatttctccttcttgttacttgattcccaaagatacttgttaaaatctttggttcctgactattaactattactctgacttccaacccagagaagagtactaaagattccctttcacaaggtgcctcttcctagagtggctatcaaataggcatacagtcctttgagttttaatgtcagggatggatgggcagtacctagtgtctgtgtttttgaaaacatgcctcttcccccttgatctctaaacagaatggtttgctatttttgagagaatgagtagtttgtagtctggccagtagacaatagtagtctatgtttggagtgagtttgcttctctcctaatttgaactacccatttggcctcgttacttaggccttgtatgtatactagatttgctttcattttgtttttatattatgaaaataatatatgtttgtttaaaaaaaattaaacaggactgtggctcgtgcctgtaatctcagcactttgggaagctcagcactttgggaagccaggaatttgggaccagcctgggcaatataatgagaccccaactccacaaaaaataaaaaaagtttatcatgggcggaggagtgtggcagttttaatgtacgtccacaaattcttcagtacttttccttctaaaagaacttaattcccctttccttgagcacagacagtatttagtgactccaatgaatagaatgtggtaggttatagtgttagaattctgagtctaagcctggccaacatggtgaaaccccatctctactgaaaatactaaaattagccaggcttggtgacgggtgcctataatcccagctactcaggaggctgaggcaggagaattgcttgaagccagaaggtggaggttgcagtgagccaaggttgcgccactgcactccagactgggtgatagagtgagaccccatctcaaaaaaaaaaaaaaaaaaaaagaaagaattctgaatctaggtcataaatgacattgcagctttagcttcattgtctctttgggagaagccagctgtcatgttgtgaggacactcaagcagctctgtggagaggttcatgcagtgaggagctgaggccttttgccaacagttgtgtgagtgagggagtcatcttgaaattggataccgcacctctagttgatattttgaatgcaacctcactagactgtgagacagacccacccatctaggcttaacccaaattcttcatgcacagaagttgtgagataataaatgcctggctggatttcagactggtgacccacttatacctcttatctccccctttttgaacataatgtctgtaacagttatgcccgttccaaattgtatgttagatgtatgagggaagataatttgtctttagttcacaggcctgcagatctaaaggaactgtatttaaactacatttttggacttcacatgtacctgttttagatgctagtatccttgatattaagctaatgctataaagagatgagatttttgtagagttttgggagggagggagtatattttgcatatgggaagaatgtaagtaatttgggccagaaggtggactgtgatggtttcaaaatatgtccacactcttcccttcaagaggtggagcttcattctcctgcctttatgtttggattggacttggtaacttgctatttatttatttatttgtttgtttatttttttgagatggagtcttactctgttgcctagactggagtgcagtggcatgatcttggctcactgcaacctccacctgctgggttgaagcagttctcctgcctcaccttatgagtaactgggattacaggcgtgcaccactatgcccggctaatttttgtatttttagtacagacggggttttaccatgttggctagactggtctcaaactcctgacctcaggtgatctacctgccttggcctcccaaagggattacaggcgtgagccactgcgccgggccgtaacttgcttctaatgaatagaatattgcgggaactgatggtgtgtgactttttcagattgggtcataaatggctttgtgacctcttttgattgctcactctgggaaaagctagcttccatgttgctacatgaagcctgttaacagccatgttagtgagctatcttggaagtggatcctttcagccccagttaaggcttcaga

SEQ ID NO: 2042 - protein, 502 aa, Homo sapiens
MEGREWVGASGPGKAAAFLEQDSQGAHCFLEEECSSLPRPTAMAMAQKLSHLLPSLRQVIQEPQLSLQPEPVFTVDRAEVPPLFWKPYIYAGYRPLHQTWRFYFRTLFQQHNEAVNVWTHLLAALVLLLRLALFVETVDFWGDPHALPLFIIVLASFTYLSFSALAHLLQAKSEFWHYSFFFLDYVGVAVYQFGSALAHFYYAIEPAWHAQVQAVFLPMAAFLAWLSCIGSCYNKYIQKPGLLGRTCQEVPSVLAYALDISPVVHRIFVSSDPTTDDPALLYHKCQVVFFLLAAAFFSTFMPERWFPGSCHVFGQGHQLFHIFLVLCTLAQLEAVALDYEARRPIYEPLHTHWPHNFSGLFLLTVGSSILTAFLLSQLVQRKLDQKTKEICRTHSRDRPRKLVRGRGTAKGARALPGRGWRPGRSRRSPAPSVGARSERRRPRFWRSLRRREPAPASCRLRLLSGHEADRPRGGGLRRVAGRGGAEEAESAGITGVSHCAGP

SEQ ID NO: 2043 - DNA, 26184 bp, Homo sapiens
  source (1)..(26184)
  CDS (201)..(967)
  CDS (1028)..(1263)
  CDS (1335)..(1440)
  CDS (3650)..(3871)
  CDS (4688)..(4998)
  CDS (5577)..(5681)
  CDS (6051)..(6294)
  CDS (7124)..(7322)
  CDS (7465)..(7586)
  CDS (8116)..(8851)
  CDS (11193)..(11481)
  CDS (11714)..(11817)
  CDS (12950)..(13449)
  CDS (24832)..(24995)
  CDS (25686)..(25984)
  modified_base (11964): a, t, c, g, unknown or other
  modified_base (11967): a, t, c, g, unknown or other
  modified_base (11970): a, t, c, g, unknown or other
  modified_base (13688): a, t, c, g, unknown or other
  modified_base (17473): a, t, c, g, unknown or other
aaaaaggattagtattacttttttaatgcgatggcgcgggggggggcgggggggggcgggaaatggagtaggcagacttttgtctgattgtgtgagggtgggaagaaatgttatcagctgagaagatgaaagaaatggataattaaggtactttccagaccttagcaaggaagatgacagctctgatgagaaatctccctatgccgaggcttcagaagcagcccttccagcagagaaagtattcattagaaaaagaaggcaaagtgatggatggagtcagggtccagccagggtttgggaagaggctgtacagggtatcgatcgcagttctcaagagaagagagacagatcagcagagatgctgcaaacaccagctgcctcggggccaccccagttctggggctggctctggctcggagacagccttctgtcatcctgtcatcgtgacaggtgatcttggtcagcttggccaggtcctctcaaatccagacaacgccacgccaaccctctgctctgcatcagggcagcgtgggtttcccacagaggaggcacgacacgggagccgaggccctcccccacaccacccctgtgtccttcagcacctcctacagactccctccccttgcccttctgattcacagcgcccacctccctgcacctaccctattcgatctacaggggagcggagtcgcttcgtggccgccagcccgggaaggggcgccagccagctggcggacgcacggcttagaggggcgtctgggcagaaaggtttggggctggggagagatgcagtgagcttgggagagtggactggtagcacaaataatgtgtgcataagggttagaagaggaggtcctggagctttggtcttctcttttccccctgcaattgtgcatttcggagggactcttgctgcaagctcggtaggcaatagcatccgctccaagactacacttcccagaaggctgtgagtgggtggggggggggggcgcggggaacaggcaacctgtgttgcgcttgcgcaaagactgcgctggaaaggcaggtggggaggaggggaggcgtgcccgcgacggggcgagggggagggggccgcgcggcggcggcgccagggcgggcgcgcgtccgcggcggtgatggcggtgcgtgaacgcgcggcggcagcaatggccgctctggagcggcgggtgccgagtctcgatgacttcgcgggacagagctggagctcgtgggtggagcgggccgacctgcccgcggctgacggtgagtaaagccaccctaaagtccggggaccccatcactatctcccctccccccttccgggcccccgccagctgaggggagccgccgactggagccgccgtccggctccccggccccccaaacaaaggacccgccgggtcctagtgcccgcccgctccgtcaccttcgcgcctccgggtcctagcgccggctcaccgctcgcagcccaccctgccaacctctgcctctgccagtcgctaatacctgcccccatataggcttgcctttatctttctccttgcctgctgcccctcagctcgcgaccctcctgcacctgcctccagctttccctgtccgcaacagtcctccacgtgtttcccacgcaccccacttctgtgcccccttcctcaccccccttgttccttcgccttttgccccacacctcctgctccttttcggcatttgcctgcagctgcagtgcttttagacccccgccctctccgcgttagttcgtccgtccatccatctatcctccctccctccatccttcggtccatccatccatgcctccaacccactgtcctttcccaggcctcttgccctgcctcttggctctctgctcttactctcaccttctctaggcccctgagtgccttagtgagcgggcctacagccccttcttctgatctttgtcttctgggccccagggagcacctggcctcgtggcctttcggggtgacagcaggcatcacgcccctgaagaagtttgcaagtgagaagaggtggaggaggagactgcacggaggggtctctaatgacacttgttctcctctgagacatccgactcccagtttcgttctatccatcattccccgcacttgcatttaacggacttagagtgggagctgccccttgtctcttgtgtgcctaacccacgacccctcataatctggatattatataagattgtcaacaatcttctcatcctagaaaggagcatatctgttaatgggcatcagagagcagacctaagtgggagcccaggccaccctggggctgccccatgctgggtgggcaaagatggggccattgtcagggtctgggtgcattgagaaccggaaatggagtcagaccgggtttggtgactcagaattgatttttttttcccaagggacaggagggggcgtaaagaaggaggggaaaaaaaaaaaatggaggagagaggtagggggatggggaaaaagctgctttgcacagctaagatgtttttgtcattaacccagaaactgaggtacaagggcaacccctgcccaaaggccctctaagaaggggagggacttgcatagctgaccaaggagactttgaagatgctcaaggaccaaagacagcagtttctctgctctgtgaccatcctatcagtgcaggacctgagaagctgggtgtaactttgacaatgctatggtaacccaggtggagcaaaattgagttcatgggggtggggacctgggagagtatctatttgggatgccacatagtagcagaaaggacccatcgagaaatctcaagaagagactcagggacttatagaaacattggttaaggacggtttcccctttaaatggggaagcaggcccagaaaagagatgatacttacccacaatcacccaactagttagcagtggaaccctaaactgcaccttgaagtgaagggtcccataagaaaggtggatggattcttcttagtggggccatcttagtccagatgcagcaggtgaaggaagatgggcatttgagaatggacccactgaaaggttccccaagtggtcctagcaccaggagcttgtcacggagtgtgggcttcatactgttgagctgcaggccctgcttggggcttctggaaaggggacaacctctgggttgtcttctgggaagaacagtctctggtaaggagaggctggagactctctaaaactggccctgacccttctgagctgtgtttctcctctaggggctgagctggaggagagtagcaaaaacacgaagaagttggatgccatgaccctcattaaagaaggtgggagtcgacacacattagggctgggacccagggcagacaggaccacgctccacttttccaccacactacagaaggaggtggctgcttgaagcagctgtctggggaccctcattttgataggtccgagtcggccggttgttctggctcctgtgacctgtcgttggagatcataatcataggtgattgcccactcacctgaaagcgtataccctttgggactgcttagatcgaactctggaagctggaagcattcagcatggagcttgttatatcagcggggaggtgaagtgccttctgagtgtggggtgggagtgctctccgatcttccagagaaaccctgggatcttcagccccagtgacatgggcttctgtcattgcagacatgtccatcttcgggcactgccctgcccatgatgacttctacttggttgtgtgtaaccactgcagccaagtggtgaagcctcaagctttccagaagcactgcggtgaggggagccctagggaggagataaagggacaggggaaggtggagcatggaactctgaggacagggtcagttgggaggtctcgtagggtaatggagggtggtgttgaggataggaaggttgtgggggtggcttcagagcattgtggggagtcgggttattgtttgaacaaaattctagcatccagtggaattacgggaggagttaagacattcaggaagctgggtcttgaattttgagtcctaaaggctcagattcaaatgggaaggaggcatgtttacaatctaatttatggaaactcagattctctcatgtgagtctatggacatggttaggttggggaaggaagtggtgataccactcaccttgattattctttccacctcctggtgacagaaagaagacatgggcccctcagcaagctttatggccgggccccacccccacctccagcccctgccagctctcagaaatgccatgtagtgaatgggcagggcccagcttgtagggccccaggttccacgaaaacctcctccagggagaagggccaggggtcccggagccgtggccaccagcctcctgagaagacccagaaggacaacctctggtaaggagaggctggaaactttctaagactggccctgaccctgacccatggatgggctgacatcaatacagacagccctgggtcaaggcatactcctcacagcaggaggcagccgtcctgtctgcagcttccttccatatattccagggaagatggggtctcctcttcccgtgtttcacacccctgctggagcccacccaaattccagggctgggaaagagatggctctgggctagagtccaggccccaggcctcgcctcccctcccctccctcagccaaccccctctctctgtgtgtagccttttcgtgcctgtggtgaatctggagaagatgtccagtctcccgaagcctgatggacatggaatcagggtggccccaccctctgcttttctcagccagccagggggcctcaccaaggactcccctggaaaacctcccatggctcccccttctaaagaacctcctggcagagagaacatcgagatcatccccagtgaggggtccagtcactgggctgaaggcagccctcctgaaaaggagcccagtgggaccaggctgccccctaaaacccaccggaagatggctcgtgagtagttgtggtcttgggggtccagaatgtagagtggggactcctttgggctgctttgtccttgggctggatgaggaggaggtcaggtttatgggcctggccatcacaggttgtagggtataggagccccgtcacctcttgacctgcttgcttcctgggaagcttctctccatcctgtgtctcctgatcaaggctgagggagcccatgcccaggaggtgaagttctttctcactcttttctcacctagatccagggcgccagccagacacatctcacagctggcttctctggcctcccagatgcccatggctgcttttgtttcttgatgtgtgttgccctgctttgggcttgaagtcccaaaaggcgcacctgaaattgggatagggatggttctcacacccagcaaggagatgttgatgcccagaagtttatctggaaggtacagccccaggctgagggctggagtctcttctgccttagtaccagttctcaggcccttggcaggaagcggccaaatcctcctgtaaactcctggaaatggtcttgaggttcattggaagtgctttccccacagggaaggagtgcgacctcaacaggcagtgtggggtaataaatccagagaccaaaaagatctgtacccgcctgttgacctgcaaggtaacccccttcccactgcacggtgagggaggacagcacagggcttgcccactccttccctgggcaaagagaggaatgtcgatgttactgaaggtccagcttaagggagggcagttaggcccacccaagggaaggggagatgggtatgcccctcctgggcagaaggtgggaacagtgggaaggagggagtttccagattcccccatcccaaaggagggttttggccccatgggggaatgaaacaaagacacatgaacacagctgcaaatatgcccacctctctccctgccccccaacttgcccgggccaaagcaccctgccgtccctcaccccttctcagttcatacctactccccagctctccactctgctgtattctagatccactcagtacaccagcgccgggaagtccagggccgggccaaggactttgacgtgctggtggcagagctgaaggccaactcccgcaaaggggagtctcccaaggagaagagcccagggcgcaaggagcaagttctcgagcgcccctcccaggagctcccctcctcagtccaggttgtagcagcggtggctgctcccagcagcaccttctctgttcgtgccaagcagacctacccatactgtgcactgcccaggtacgtctagaatccaacccctacctcacctgggggtacttggcccctaagccatcaggggcccctggaaacaggctcagggagtgtcctggaagaggcactccctcagccctgagtgtgggggtattcctggggctcctgacagtggtgtggaagcaggagactcccctgtttccaaccaggcataccacggcaccccagcctctcggcagtgtgccagatccaacactcaggatatgaacattttcccagctgcctccaacagaccgaaacttgtcactggggagctgaaagggtcacactcctgggcaaggcagccctatgtgtattcactcactggccccttcgcgtgcagaggctatgccggaccccagggagagcctgacttgctgaaggagacacacatgcatctctgcctgtcacacaaggggcagacacgaaacacaggctcagctcacagacaggctcacaggaatatgtgatgcaagaagggggttgagcgagttgactgggctgaccagagctgggtacagttttaactgtgaagattttctggaggaggcggatctgcagcagattatcccctgaggaggaaggggctgggaggtgaaggggctggggagagaatcccttgggagcagtctctctgtctcttactctgtgagctgtgtcgttccctcctgtccttcccttccctctgtcctcttctgattgccctgcagggtgtctgccctggtgccctgctctttgagctcggcaggttcaaggatgcccctactctgaccccacaacagtcacattcccctggcatcccttttggcccttccaggtcccgggcctcctccgagagtgaattggatgatgaaggcccctgtggtggtgatggggacccaggcctgttccccttccccatgccccggggtgggacccaggcctccagcgaagagagtgaggaggaggggacatctgacgacctccacccaccccctgactgccattatgcaacccggcccccacggccacaggcggtaaggacctggaataggggcctatggagggggtggcccagcactcctggccaacaacatggggaggaggccagatcctgtgtgcagatgctgtctgtgcaccccagaccctgccaaccatgcaccttccttctgcctttagttctgcacctttgggagccggctggtgagcccaggatgctatgtgtttagccgccggctggaccggttctgctcagcactcagctccatgctggaacggcacctcagcacacacatgtggaagtaagtctctcggacccagaatggaagttctagaatggaaattcctaggttccagacatacttgggcttcagaagccctgatctttcctgtatacccataggtgtgccttggctatttgccagcaggaccccagatagggagtagcatgaaaaggaggtgggaaaacttggcagcctagagtttggctaaggcagggcatggaagggtggtctgggggtgaatctagactttcatccatcacttccagtaccttttgggtaactagggataggggatgcccaaaccaagatttaaaatgaagttcctagtgggctgcctcctagttagtaggtactagctaattcctctccacaggcacccctgtgtcttcttcctaaccctcagttccagcatctcccagcagatggcagcaactctggggctctgctgaccatttctaggtggggcagagagactggagtgtgtcttgtgttgggggaagctgtcttgtttcttggcagtcacagtggggctttctttttgctgcaggaagatcccaccggcagctgaacctccagctcaccttgtcaactccccgttatctgctcccctgagcccatcctctacaggcacctgcccccgccttccaggtccaaccctgagacctgcctgctcagcctccatgccccccaccaaggacaaccttgtccccagctaccctgcaggctcccccagcgtggcggctgcctgtagccaggcagagtgcatgggcgggagccaggctatcacctcaccactgcctgccaacacgccatccccgtccttcagcaagctgccgccttccaaggccagcaagtcatccaaaggcaaggacggggtggaggtggaggccccttctcgaaagcggaagttatcccctggccctaccactcttaaacggacctgcatcctggagcccactggaaaagggaaaccctctggctgtaggggcctctcggccaaaactaaaacagccctgagcatggggcttaatgggacaatggggccaagagtgaagcgggcagggcccctggactgtcgtggctcccctcatcagctccccacaccagtcaaggcttctcagctggagaaccggggagcagctggacacccagccaaggccctgccaaccaactgcctctctgaggaggaggtggccaagaagcggaaaaacctggccacttattgccggccagtgaaggccaagcactgtcaggctggtgcccctgctgatgtggcctgctctgtgcgccgcaaagaagccaggcccggccctggcctttgaggagaagtgctctacactgaaggtaccagccaggctccctgaagattgatgagggtggggcacacagggggtacctgatacagagaagatgctacattggtgtttgtgcagggaaagggaggaaggggaagttgagagagttcctggactgttttctttaggaagaggtaggtcagttcttagcaaagtgactccagctttttgcctggtgaaccttcccctatccctaaccctttcccttgggctgaggagatgcggcacccctccacccctgcttttgctataatcaaagggctacttctttctgaattggctgtgaccctcattccaggtactggagctacctctgttccctgaaggaaagggagtttgagtccctgggtcacagcctaacatgccgagcagcaaggtgggtgggctggtctcactggtttttcctctgggcatcagggccttgaagggcaggcacacaaccccatgtccacttatgcacatgtgcccacctccaggtgtgcaggtgacaggcaagttctccagggtttccagtaaagcctgcagccagttttatttgcctcttctggtgggagccctggtgtagtgtgctatgtgctctccatatgatctctgccaggagggacttactggaggtgggacgggggtgctctcctgggttagatgtgggcctaatcataaaccctgtgtgttctccagcttcactacccaggctgcccctggtgagctggcattcatcttcccccttgctcagttttactcaccaggccagcagaaggaaatcaagctttagcctctgtagtgcacacagttcactgggtaggacagctggtaggcccccaccctgaccctttctctcgcctcttgtcttcctgcagtcaaaagcccattaacgagaaagtgcctgcccactgcaacggagccgccagcacctcctcccctccagatccgggccccaggctgctgccgctttttataactttatattattttttttaagaaaaaaagctctttaaaatacctcaagactgtctccctgttctgttgctgctatgaaaatataaaaacagaaacatagaaaaggaaggaaaaaaaataacaaaatgagtgtccttactgtccccagccctaccctgggaggctgagatgataggcagccagactccagctcccatagcttgcctgcaaaagtctcttatgctcattattattattattgtcatcttgtcattttcaatagtgtgaaaaatgtttgtgtcactggggtagtctttccagacaggatgatgaggcgtgtggctctgaatgagtaaggcttcctgagtcttgacaccagagacgactatggtcccattgggaagagaaactcgagagggggagctgcacttctggctctttctaggatccttgccccgagggtctgggaattggcttgtgacccttttctggtccttcagcaaccctaggcatccatccctccctgaattattgcctgcttttcttcagctgttcctgcagcctcattttctcagccacttagggagcttgagctgggttggtcattgctgttgggatattcctgttttctattggacagccttccttccctgcctgtgggtttgcctttaaggaaggggtagaacctttcccagggaggcctccttgggttgaaccaccccttttttggaggcaggaagggaaaaggcatcatcacttgcagaactggtggtgtgggaggccacaggagtgtgggaggccttggtccttcaggatcacctggctcctcagggctgagcagctgctgaggaggcggcagggctgggagtgccctagtttttccatttatctcgctggggaccactcccgtgcagatgcgagaggagacttgcatttccctcctttggtccaccaggttcaaggcactatattttggcgatgtcctttcctattctccttgctcttaggcatggaggaagcttgttccctgaacaagacaaaatgaggtgacaggagacagtgcacagccagggaaatccagtactactagaaatcggctccaaacacttgtttcacagtcttggttcagcgtaccaagtgtgtgatttggggtttcactgaaatcgtttgccacgaaagtaatttccacaggctgcttgggatttaggcccttgtagacagacacacagatacaaatgaaggtgggctgggaactgttcggtccccttctgcctccgggctctcgcgggagcgggcctctccggggcactcgcgtttcccccccagcccccagagggcgctgtgggccactccgccgcactgccggcggcgtccccggggaggagcctctcctgcagccgccaccgcctccgcgatcgcaaacccggaagacgtgttcgggcagctggagtgtacgggcccgcgggccacggccatgcagcccctggaggtaggtctggttcccgctccagctggggagccgagactgacccgctggctgcggagaggcagtgggatcttggcgcacctggtagctttgggcttcaccatctttctgacagcgctgtcccggccaggaaccagtgagtgtgcggggcggggttgcggaagggggcggagtggagatgctggaggggcagcgcttgggagccccgggagacttggaggagggaccccagcagtaaaggggagacagaaacagtggagggattttgagggcctggtggggcggggccccagggatcctggaataatggggttttgggtgctgtgggggaagggcagacgattgaacagaccgaactacttcctcagaaacaggtcccctgatggaggatagaagtgaaggaggccgggcgcggtgggtcatgcctgaaatcccagcactttgggaggccgacgcgggtggatcacttgaggtcaggagttcgagaccagcctggccaacatggtgaaaccccgtctctactaagaatacaaaaattagccaggcgtgatggcgcgcgcctgtagttccagctacttgggaggctgagggaggagaatcgcttgaacccggaaggtgnagnctncagtgaaccgagattgcaccactgcactccaccctgtgcgacagagcgagactccgtatcaaaaaaaaaacaaaaaacaacaaccaaaaaaaacaaaaaacaaaaaaggggcagaggactgggctgccagctgagaggtgctgaacggggaacccgggccaaactgttgtatgtgtgtggataaggaggccctcttggttgctcaccctggggctccttggctgctccactttgtccttagttcctgtgcccgattaggattggggatggtacttttctcctgtggctagattctttgggttccacctagctacaggggcaggaacaatggtaccaagccctcagcctgttctctttgattcttaggtcttttctcctggcaccctgtattcatggccttggcggtgagtttaggcttctatctgatttgtttgggtattcctcacctcattctcccagggaagcacccagctttcagaaagctcagcctttctaaggctaagacaggtggaggaaacatctagggctcatctttccctgcagcctatgggattgggaaacctggagggctgggccataggcagttgtcagatggttgaaaagggcgggagggcatggaagataatttctttctccattggggccggaaaggagaaggggggagaggtgttatccggtcatctcccgacttgtccccaaagttcaggaagaagtttaacatttgctactccactggtcaagaaatgggagtcattgtagaggttgggatggggagatgtcaacctgaatgaggagacgtgcactcaagtgctgattcccaaatgttcccagaaatgttgagctgtgaggctggtggtcctggttgaacttatttaacccttaccctttgtcctctttgttaggatgtatgagagcacctcctttttctcaggcctccaagccagacatgaggcttactggctctctcctatgttcacagttctgcctctgcatggctgaagccatcctactcttctcacctgaacactccctgttcttcttctgctcccgaaaagcacggatccggctccactgggcagggcagaccctagccatcctctgtgcagctctgggcctgggcttcatcatctccagcaggacccgcagtgagctgcctcatctggtgtcctggcacagctgggtgggagccctgacactgctggccactgctgtccaggcactgtgtgggctctgcctcctttgtccccgggcagccagggtctcaagggtggctcgcctcaagctctaccatctgacatgtggactggtggtctacctgatggctacagtaacggtgcttctgggcatgtactcagtatggttccaggcccagatcaaaggtgcggcctggtacctgtgcctggcactgcccgtctatccagccctggtgatcatgcaccagatttccagatcctacttgccgaggaagaaaatggaaatgtgagttcctgcgaacgctgaatctaggtgggacgcttgccttgaacatcatggttcctttggtgatctataagggatctatttaagaagtggtcaggttttcgcacttcttggctggtccagggactgcagaaaccaaagctgctattgttgaggaataattcagtgggtcaaaatggggagatgtactgggtatgagtggaaggtgatggagagcctgatcctgaagcctttacttnatgagagacagagttttgggtgagtgatagtcatgtgctggtggtcattttgtagtttgtgtacataatgggtttctccgttcttgtcagttaggtatggcattccatggatattagtgttacttctactacagcattgtaatagtagtggagagacaccattgatctctacgcatcgtatacggtcgtctacggttcagttggtctcctaagcccatgggtcttatttatgggatatggtcctcttaggctctgttgtacaaccttaggtacattccatatcttaagaccactgtttcttcatctgtgaaatgtttctaaacaatctctaagtcccttccttctctaatatacagcgtctgtcaggtcgatgtctcagaacactctcccagctgtggaccacgtggaccacttagcagactcagggggtagttctttactctccctttactaccctggagggacagctctgcccttgaggcccttcagaaatttgtgctgatttggtccctgtgccagggcacagggggtcaggcactgtggaaagaagggactcaggtgagggtcttctggactctaagacggtaaaggcactaaagtcactttaaagcttttggagaagcaggagggcattggcttaaccaagccgaaggctgctggctgggctgcctagcccagctaagatcttccttcagcccacctcaggatccgggcttgagggctgcagggcctgcgtgcgctccctcccccgaaatcacttctcagggcaaaggagccccaggcatctcatgctttgcccttcttagggctcaggttcttgccttagcacatagcttctgggagcttttttgaagcatttcataagggccaaggaagtggggcagggcttttctgatccaaagaaaacaaagtttctctggttacccctcttcccttgttatctaagctttcctcagttgtcatctcttcccagctctttggtccaagagggggctgagtttggtgccagctggcaaatgagggctggactctcttccctccagagaccaccccgctccttgctgcagctgaaagtagttccccaggctgccctcggtggtgaggactggatgctagactgctgagctgtggtctgggctcagttgagaagataggatctccctagatcatggcaaggcctgacaacagctgagccaggaaagtgctgctgaggcaagtcgacatagctcacagggaactctgggaagcctgggatgtaggcgctggagctccagttcccaggagcaggggcaggtgttcctagatgttagtgttgtggatgtccttggtcttctgaagattcaggtcctcctctccgggtagcttagaagtaaggaggttggtttgattcaatagtatggggacagaatggggacagcaagggcagaagtgtcctctccacgtaactcattatgcccctcctgggggagattgcatctccaggacaagcatctaaaggaggcccctgctgtgcagaggggtattgttcctgtctctttcattgtcctccctcctctcaaactctccagtgtggtgtgaactcagaagaaacggttactggggctgcatggagaatttcacctgcggtgattttgatccagggactgcatctcctctttcctcatcacagccagtgctgagaggctccttctacctgccgcagggtaggagggccaggcaaagttcaccagcttgctctaagagcaagcaggcaatgccgtaaagcctgagcctgcctgaggtgctgcctcctcccaggtggtgcgggggctggtgggcgggcgggcaggcgtgctgacagccggcagtttgcgtgggctgtgccatctgatgtctattcccagccctgggaggaagggggagtcatttatattctgcaggaggaaggggccccagctgtcgcctttctgaccagcaggcctggagggcaggggcacagagcagagaggagggcactggtggtctcctgcttagcctggtctgactgcagtgtagggaataggtcaccaggaggagcccttcatcctggcaggccggattgtggagggacttccctccccctcttttccatttctccctccatcaccacctgccctcacatcctggggcagcagctggacagccattagacctcagtgccagggcactcttcctccagctgggatctcagtggctcccagctgcatgggctcctgcttgtgtgttccctcctccgccatcctctgttccccgcacctcccttattctgctcatgtctggggtattcacttggctcctcagcaaggaagcaaacgccttggaggagaagcacatggttgcccttttgtccttgctccctggctagggaaagctgctagtggtcagcctgttttgccttttttttaaaaaaaaaaaagccagggcagggtgcttagattttaaaaatttgcgtgtcatttgcacaaattttcatatcaagctaagtcctgattccaaatttgattatattccaaatttgattatattccaaatttgattatattcagattcaaccttgaggacattagaaatatagatggcttctgtatccaaatctgaatggaaatgagattacccttctgggttcagatacccctcccaagcccccgtcttttctgtaaccacccctcctctgagccccatcatggctggggttggtatggaatgggagcagctctgtatctggggaagtcctccagcctcaccttcttggctcttaagtggtaggctgttaccacttgccagcctgggcctcctctctccccaccctttcacaaggcaggctgcccttccgcactcactggcccatcccttctttctcatcgtcccacccttccacccccgtgcatggctgctgtaggtctggtttttttggtttttgttttttttaagacggagtctcactctgccgccaggctggagtgcagtggcagaatcttggctcactgcaacctctgcctcccgggttcaagagattctcctgcctcagcctcccgagtagctgggactacaggcacgtgccaccatatccagctaatttttgtatttttagtagagatggggtttcaccatgttggccaggatctcttgacctcgtgatctgcccgcctcggcctcccaaagtgctgtgattacaggcgtgagccaccgtgcctagccaggtcttgttttgaaaacctcactgtgggagattcaggcatcctccctaagccagctggccgctgtgctaaagcctgttcagagttaataataatcattagctgaatggtgctggggcctttcagcttcagatctctaagcacttgcaggctgagtcagtcagccctcatcttccccctccttcctgggctgcagagtgtaacagaatgggaaggcactgtgggaaggaagtcaggaatcttgctgctagccacgccttgcagtgacttctcgtctgggagtgggcactgagtcctctcagtaaactaataagacttgcacctgacaaaggtcaagatatgtagggaacacagtgtatgctaggctgagacctatggtggtggcaggggtggctgttgagcctgaacttccagtactcctgcccttccttctgtttacctggcttggcctacagggggcacccctggtcttgatgcctcaagcccagcatttctgggtcccctctgcagctcagagagcagggaggcttctggtagtgctcttgatgctcctgtgtctggttggcacanagatcctgtgtaacatgaaatgaaaggtgcatcagcttgggggctgggaaacctgcagtatgggtttactccgtccctatcactggtgtggctgtgggcaaaccacttattgcctgacctacctcacagggatgttgtgagggtttgatgagagaatgaatgttaataggaattggaaaattcaaagcattaaacacatgtaaacaggtggtattattatgttcttgtccttctctttcactgagccaggctttgggctttatgcttcttaggcaataaacagttatggataatgacaggggatctaagtctcagagagttgttctggccatcataagaaaacatggacacatttcttccttccagatgcaaggtcagctcttaccaactcctgccagaaatgccaccacggccatgactagtgaagtttgccgtaagtgctgcctacctggtgttcccaaatcacagggcagactgcagatctcggagtcagtacaattcctccctaggtccagcctgaagttcctggagctggtcttcgtagggagctgcaggtcacaagtctatctaaatctctcctaattctgcccttctgagggaaaagtggagcagacaagctaggaagggaggagcaactggagcaaacagcatcgccacagaccctctgtttaccgaagccacagaatgagcaacacctgcctcaggcattggagatgcagagcagggacccctggcttcccagggtccacagcctggtttccctttccccatttcaggctcgtggaataggatcagtcccctcctcctccaagtgctttattggcattcacatacacacacacacacacacacacgcacacacacacacactgaaagcagttctgtttaagttttaaattggggaagaatactttccattccatttgtctgagagcagcagcagtctgcctggagtggatgcaaagaagcaggaacagcaaaacagcagtgcagaggcttgaatattcgttttttatcttaattgctttttctgtcctgggatccaggaatgaaacactagtcaggcattgtgtgcagagcctcagcagttctcaccagcactgcacaaagacgacaagctgaaaggcagaactgccctggagggtggtttgaagtagcccgtctccagcatggcgctgggcttaaccccttcatgtaggcagaaattacctccagtgaggggaccttccccctacccacccactcaggagactcagctagtcaccagatgcatcacagaataacaatctcagtttataatcctgctattgctaggatttcccagatgagtttttaacctctgttggaagcagattaaggaacgacttcaggctattcagtggcatctgaggagccaactctgtctcactgagtatacatgagtggccccctagcacccctatctttaaagcagatacccagttatctcatggtgctttctaaggatgctcagttctgctcaggccccccaaaagcaaactatgaccaagtgagggagcggtgggaggtaagggaaatgcagcacaaagtacaatccaactccagtacttgccaacctgtatgtgtgcgcacatgcacgcatgcaccagccttggaggcaatgactcctgcctaatgtatgccagtgccaaagggcatccagaagtcccactgcagggctccacgtcctggctcactgcaggttggttctctcaggccatggttccaaccagggagagtaaacaagctgactagattggaggcgtcagggcaggtctaagtgtcttcaccattttgcattttccacctaagagtgtagaagcctgatgaaggggcttgactggcagctgctttagccttcctctctcaagccccaggagaggaagcattcagcacaggctgactgtgactagaccagaaaagccaaccgtcccactgcaggggcctgagccttttctgctatgtgggtggagaaagtgaagcttccccactggtttcctgggagatacaagataagtggtgcaagaagtgcatgcagaaagggaaggagttgagagactggggggaagagaggccaggttaaccaatgcactgaactcttacctattctcaaagaaaactgtcatattagcctcctccctccccgcaagtgctacctaagaggagccagggtaagtgctgcaaggcatggcagacaaaattgcacatcttggccagaatctaaggaacttcttgtggtttgggggaggtggtgaggatgtgggtggtgggtgggtggggggtgttgaagagatgcagccatggacttccttgggcttggcacaggccaaaacagaagagagaactccaaactccaagtagtcctcatcagacttgctctccttatcagcttcatcctgtcagccaaattgtcagccatagaaaaactgctttgcagatgaaaaactatataaatgcagagtatgggagtgctctgacatcaacagctgtcatttcactgactgccaaggttgacttgtctgatgtggctggttgtgcagtagctccacccctcgtcaccttggttgttcctcctgaagtgaaaaacaactttccaaatagaggagggctgcccttcggtcaagactttaggtaagtattcaaattcgcattcttttaatttttttcctggtatcatttcctctccctctttggaatctgccacgacagcccccttctagaatcaccaagagaggagccaaagaatcagcatggttagagttttagagtccagtccaatttctggtaggctgaatctgtaccaaaacgtagggactgcatttttctgttccacgcaatgcctaggacacactaaactgtcaaggaagattaacctgcccattaggtgaatatacttttagcctaagatggctaccatttacaacatgaaaatactgataataaaattctgtgaaagtgagctgctgcccaccattttttaaaacccaatccaagcattttttccatggtatggtcagtaggcttgatccagacttttaagagaactcggcagggaggcaaccctctgccctagggatccaggaagacttcattatctacaagcctcagcgagcgccaagtcatgggatttctaaactctaaagcttcagtgacatttgagaatcttaggggtcagcaaagtatggtctgttggtcaaaccagcccccctgcctggttttatgtggcctgtgagctaataatagtttatatatatatatatatatatatatatataacattttttttttttgagatggagtcttgctctgttgcccaggctggagtgcagtggcgcgatctcggctcactgcaagctccacctcccgggttcaccccattctcctgcctcagcctcctgcgtagctgggactacaggcgcccaccaccacacccggctaattttttgtatttttagtggagacggggtttcaccgtgttagccaagatggtctcgatctcctgaccttgtgatccacctgtctcagcctcccaaagtgctgggattacaggcgtgagccaccgcgcccggcctagtttatatattttttaatgcttggaaaaactcaaaaggcatgttaaaatatgaaattcaaatttcaatgtccataagtcaaatcttttttggaccacagccacagtcattcatttttgtcctgtctgtggctacactcaagctatagcagcacagctgagttgtaacagagactgtgtggtctgcagagcctaaaatatttactatctggctcgttagggaaaatgtttgctgaccccggtccatcttaatgcctagatgtgtatttcacccatgtccgtacaatagcacttaaagattttcttcctagataggacacacccttctgaggtacagtgaaccccacccacaggctgaaaaaataaaccagtcagattgtgccagaacagagactcaagccaggtttaatgatcattgtctagttttcagagcccagaggctccaagatttgccagcctaggtgtacacaagtgggaggaatggggtcttggacacgggaggcctgcttgctttgtcagcagagctacgaggaagtacagaggtaagaacacacagaaaactggatccatctgctttgctctccccagctggggtgtaccctctcctggcccctttcttgggccccataaatacaaaataataataataataataattacacagattgtagagccctgtcatcctctgtctccagggacacctgcttcctgggagacatgtctggtttatgggtgtggggtagggtaagaggaggtggtgatctctcggccttttcttatacccacacctggcagttttcaacacagggttctagtgcgcttacatatgctgattattcaattctccaattaaaaagctacctttgggttctatcacctgaaaccacgggaagaaacaaatcaaatctcttggtagggcagccaggtacatctaccaggtgtctcaaactcaaggccaaactagtggatatagtcaggagacttaagagccacagggccttttctcattccctaaactgggtaggaattatgaagaaaacggccctcccagtcctcaggagctccatcacgatgccccagaaggcctgcttcatttaacgctcactttaaagatcttcagagccctagatggtgccaagcggggagactgcagcatggagatgagattttcccagatttcctgatgagtctgaggagggagtcctagttcctatagctccagtaacaaaattctcaggagtctctggaataaatcaagacaacttttctctcctgaggacagttaacaggaagagcagctcacagctacttagccccttgccagtttccttctgagtccttcaatgacctagttctatcttaattgctcatatattgctcatatatatagtcttcacgggaggtttctgaggagtccaaagaaccaggtagctccttaccacctcttctcccaaggccttcaacccatggttcttctaactccagcctgggcagaaaagtgattcagtgccatggagatgtgggtgaagcttcagggagttcagaaatgaaaatacaggagtgtgtatttgaagagcctggcatggtcactgtctctcctaaagaggaatacaattgtgtgcatgaagttgtgcacattggtggagaccattctgagagtatcattaatggggactacagattcactgtcctggtggaagtcaaggtgctggtgtgcatgcatacctataagcatgcatacctatgagcatgcaggtacttgagggaaatgctgcacctctctctcaacaaaactaggttactaataaaggatggacagcagtcttgagttcccaggaccagacaaggggaagatgttgagtccccttccccaatcataataggaagcttaatagtcaggccctccaagcccctcacccacaggtaaatgacacctcttagaatgtaaaaagaggtcagaaatctagaggatctggagaacttccaatggactagaaacgtgggagagaagagaccctaagaaaaaccaacatcagagaacattttcaccttcaccctgctcatcccccgccaaagctcagagcagccactcacagggcatgcagtgtagtcaaagggaaaggttaaagggatcggtcatctccatactcaaagtattctgcaaccttggatggaatggaatgttgagctcattcttcttaagttcctctggcctcacaaccacaactgcaaagacctctcgatggaggaatggggtggcagaactccccttctgaaagtttagtactactgattatctctgcttcaggattgcctggaatctgtggagagggcagaacttgaagctgcactccaaattgccattctggggtagagaccacccaattccaacccttctgatgtcaaaaccccatgctttgactttgcagcagaggtggtatctctgagaggagcaaggcaaccttgtccacacagaggagatatatactggattttcactatcgccaagcctactctaagccagctggggccaggctttcttggactcctccctttacagagcagcatattagggaaaattcagaatcccacctgagcttgataaggagactggatgaagagatggcatacattgagaatcagctaggtccagctggatgctacataatagaggctgatttaccttcatccttctatcgtgaagtgggcccatgtaccacgtctgtggcaggcatccataaaagctctgccttcagcagcccccactctggcctgacacacagatgctgggaatcaaatactaaccaagggtttcaccaaccagggaattagcctatctggaattcaccccccatctacaagtttcgtgctggcacctatgctgtgacatggacccttcagttcatgctataaccctctgtgccattggtcccaggacaaggcacagataccacatcccacattgctgttgtaactaaaaggcagcaggccaggctcctgcaaagatccatccacccagggcacatcaggaaaaaggaaggctttaatgcaaagtcttacaacagctttggggaattgttaccgattgaggtctcagccttttcctgactcattttccaaaggttttcaacttccccagctgtgaagtttgacttgctaaacaaagaagatactacagcttttccccagtgtggctcctgtggaagctcccccaacacacacaacatcacaggtgtgggtgggcagagatagaaaaaatttttttttctaaatgtttttctcttaaggagctagggatgacctcatgaaagtttagggaatctgttcttcccctcactccttcctcattcccatccaactcagacatgcttctcttcctctaccacactgagaattggcagggctttgggtacgggtgtagcatttgcctgaggattaatatacccccatttgaaaatcgtggcagccacgccctgtttggggtcttgctctctgttgtacctgggaccaattcccttgaggtcaggaggaatccattcccttgggcagccagccctctcttccatcccctcatatccttcaggggtgcattacctctcctggggcagaatctccccaccaacccatcctgctcacaccacaatgggcgtatcagagaagaccgagctgactgattctggatccgacatcctccgttggcccttgcctgtggcctcaggcactggcagggtgttgcctggcttgagcttgccgttttgaccctgcccaggtccagcaggttccaggaaagccacccgccggtcaaaaccatcatctttgtccccaccagccataggatcatggttgggtgtggtactaagcatggaagagctgaggctgtctccttgatggctggaaggcttctctacaccccggcaccagcagcggcaaggggtgaggtataggtatatgaggaccaggaccacactaaggatacagcccactagggtggtataggctgtgttgagggtgtcatggtgtccgtgcaaggtgaaattgtgcactttcaattccacagacagtgtctcattgaaagtctctcccatggcatagcaggtatacacaccaccgtcctcgacctgcacctgctggaaaagaagactgccatccttagacacactcactgtgccattggtcacctcatctagcacccgttcattacttggtgtcacccacaccttggtcatcccttgctgcttggtgtcacacttgatgatcaaggtgtcacccaggtgggcctcccaggcacgctccttgtactcgccacagttgaggaaactcaggttgaagacattgtgcagcttcttggagttcatgcagtacagatcctcttgaaagtccatcacggagctcagctgccgatactgccagtgtgaaaacagctggtagagctcacagtcgcagttcagggggttgttatgtaggtacagcccattcttgatccaggccggcagcttctgcaggtcaggcaatggcaagttcttcagcttgttagaagagagatccaggagcgttagtttgggtagcttggctccttccttgaccagttccagagggaagcgagagatctggttctggctcaagtagagtttctgcagctgggccatgtcatcgaaggcgcaccggtccaccgccatgatgtggttattgtagagcagcagcacctccagtacttgcaggtcactgaacaggaactcatccagtgtacgcagctggttggaggagaggtccaggtagcgcaggttgggtaccggggaaaaggcctcagaggagatgaagttcaggtggttgtggctcagcagcagggagtgcagttgggtcaggcgcgtgggggtccactcggcccgcaggcggctcaggttgttgtgactgaggtccagtagtgctgtgtaactgggcaaggaatggggcacattgggcagctgctgcttggagcagctgaggatgttgctggcgcacaagcaggcggcaggacagctaaccacggctcggccagctctggccacctcaaaaagcagcagggacaaggacggcagcaggagccagaggcctctcgggtcacggtgggggtgcatagtgtcac

SEQ ID NO: 2044 - protein, 1467 aa, Homo sapiens [sequence omitted]

SEQ ID NO: 2045 - DNA, 10321 bp, Homo sapiens
  source (1)..(10321)
  CDS (201)..(267)
  CDS (1110)..(1244)
  CDS (1742)..(1902)
  CDS (3204)..(3343)
  CDS (5096)..(5244)
  CDS (5325)..(5621)
  CDS (6428)..(6589)
  CDS (8072)..(8872)
  CDS (9567)..(9764)
  CDS (9865)..(10121)
tgatatccaaccaaggtagagtcacaggtgaagtggacagctcctgatactcctctacatgttcacatgttcacagccatctctaatcctcttcctgtcattcttttctccacgtcctcccttcccccagcaaagtccaggttctctatggggggacagacctgtttgactatgaagtgcgcaggacgttcaacaatgacatgctcctggccttcatcagcagcagctgcattgctgccctggtctacatcctcacctcctgctcaggtagggcttctctcaagccagccccctcctcccctcccagggtgctcctgtctgcccagagcctgccttctcaagaatgctgcaatactcttgagcccagcatgtcagagctggggacacagggatatgcacacaaatcatcttccaaccccaaacaggcagactgaggcctggaggcaggttgggctgtaccagcccgggtcacaccctctaccctgggcccctgcacagttggaccttttgcctgttgaccatctttctcctattgatagccttgtgctggggagtctggggtattgtattcctttgtggattactttgtagcctattttggagtcccaagtcaactgccatctgccccccgatcactttttcacctccgtgtgcccctggatactagctgctgcttactcctgtctgtatacagtaggcacactctactgcccaagcagacaagacaatggtaatactttccaaaatggaaaagacattcattcgtccatacaacagatatttactgggcaccaaactatatgccagatgctgtaaggtgccagggatccagacacagttcctacccccaggtaatatgtaatgttcacaaggctcttgaggtaaggtctgcaaagaggaggacagtctgccacttgggcctcctgcccggtgccctttttgggtgtggaaaacagaattggccctgtgcctgtgctgggaacagagtggtgaatggtgaccagggttggggagaagagacaggacccagctgaggtcagggactctagtggggtttgtgtcccatgagggtccccccaccgtctccctgtgtctcttaccctgcccagtgttcctgtccttctttgggattgccagcattggtctcagctgcctggtggccctcttcctgtaccacgtggtctttggtatccagtacttgggcatcctgaatggggtggccgccttcgtgatcgtgggcattggtgagtcgcctctgttgtcatggcagtgcgcctcccacatgggaagtctgccccatcccctttctccctggatacaaagcctggcttccctgggggctctacacagcgcctgctgaggcctagagccttggagtgcagggttagaatgtgggtggtgggaggatccttggcatagggtgagtggagagagcacgaaggtttgctggatggaggtgaggatggtgggaaaggcccaggaagtgtgggaaggaggtcaggatgtgggggaaggcgcctagctctgggtgaggttggggccaaggagtgtggtgggtggggcttgaactcttggtgggaggagccaatcagaggggtctctccaaactgtaagctcagaagcaggactcctgcagcctgacctcccaggaggccactcacacttggtctagggccaggttgggcctaatcctggagacagcagaataatcctgagcctggctggggactccctcccacaggtgtggacgatgtctttgtgttcatcaacacctaccgccaggccacccacctggaagacccacagctgcgcatgatccacaccgtccaaactgcaggcaaggccaccttcttcacctccctgaccacagccgccgcctacgcagctaacgtcttctcccaggtgcggacctgtcctccattcctgtcctggcctcccacacgctcatgcatacctagccgctggtctctgcccttcccaccaccgcttgagtggccatatagccttcacctcaaggtacttgccctggctctagagttcatttttgtcacgaatcacccattacccaaacttaacaagtgggaatattataataatccagacagcatgcattagggatcctcagtagtagtaatccagcctccaccctggaggacatttggcagtttccaaagctctttctcgtttaatcttcattaccacggtaattgacaaaggtacaattaccatcctattttccaaaaaagaaacttggcccctgagaggtaaagtgacttcctcaggatcacacagcagataagtgagaagcctgaccaagtccatagtgattccccttctgcctgcttctggctgcattttcctcccttgtgctgacttcctcttgctgcctctgagtggggcttaggagaaggcattgagcccaggctgggtccttggtacagaaagacagtgaattggcccaagtctttgagaaactttacgacctgggctgagtagcccctctggaaaccagtagatgctttaggattatccaggtccttctagagaatcacttctagaaggtaggcagagctgggttcagcttctgcagtgtgaccttgggcaggctgtgtgacctctctgagcctcgctttcctcatgtgtggattatccagggactgagatgcgaggatgattgtgaaagtgtttcacagagtgtaggctgctctgttggtggctacagcttccttccaactagcacctccctgtgtggtccctgtcatacttctggaacatacccattgctcctagtccccagggtccctgcctccgtcatgtggcagcattctctccctccccctcactagcacatggcctggtctagcgggatgtgtcttcctctgtcccccattcattcgcgtaatgacagctactgaccactgcctctgtgccaggcactgttctgggcagtggactgcagatagacaagagcctccacttgaggtggggacccttcctgtgctgctgtgtcctctgacaccagcccttggctcctggtgtcctgtgaggctagtgcctggcattctggcagcctgggcctcctcctactgcctcagtctgggccagatctggggtcctgagtgtctctggctgcagggggcacccaggccccctgactgcaggtccaacctgtcccacatccctctcttcctttccatcaccagatcccagccgtccacgactttggcctgttcatgtctctcatcgtgtcctgttgctggctggccgtgcttgtcaccatgcctgcagctctgggcctctggagcctctacctggcaccactggagagctcctgccagaccaggtaagtcgggcagggcctccacccacagcagggtatccacaacaggcctctatgagccactcagtgcagcaacctctcttccaaaagccttctgtatgaccagtcctttgctaggcagggaacagggaaggagaagatgcttccatccaataactgcaatttgggatcaccagtgtcaccaggaagtgagcaaagcacttgtgtccaagatcttatgacatcaccattcacttcccaaagaaccctgggagctgggttctcttgctgtgcccattttacagatagaaaacaatgactcagggaggttgggcagctttttcaaggtcacctatttagtaggcagtagagcctggatttaaacccaagaactctgcttccagatcccatgctcttagccaccatgttaagtgtcctcaggttctcatctttagatgtagtgagacgtgtgcagagttgaacgggtcagttcagagttgctgctggaggtttagggggaaagaccttgtgggcctggtggttgggaagatggaggtggatggtggtggagttgaatcaggcctgggtggctgcctggggttgggaggatggagggtctctgggcttggaacagggcccactcattgtgataaaggccttggtcagtcgtgttcagggacccatgacaatgtccgctcgcccatggtgagccccagaggggctggagggagagaagggcccagcaaggagcttagacttgggcctgagatggactcctcagctctccccactcacatcttcacccttcaggaccccgctgtggtggtgcaggttggcactgcacacaggtgccccggcggaggcactgctctgtgtaccatgggtgctcagatttgactgttttccgtgacagtttcatgatatagaagcagcgtcatggggaaagggcgccttttctgatctctacagagatgcaaaataagccccacgtctgccccccggcctggggctgtctccccagtggtcctattgggcacagtcgtcttcccagtcagtcagatgtgggcttcaagcccagcctcctccctcggcagccatgaaaccctggacaggtgacttcacctctgcatctcagtttccttttctgtgaaatggttgtgatgtcagcagcactgtgatacctgggttcatctgtgtgtgagtcccatgaggattaagtgagataatccacgcagggctcccagctcactgctggcacgtggcagtggtattagccacacacacagcgctcgtatcagccgtgaggattattctggtgcccagtccctaggttgagctgcgtctctcatgtgttcactccagctgagacctcggccacgcagctacaccctcagcccagccctgttccctcctcctggctcccctgagtattaagttggaggcagagcccctgggccacacagcagcagaggaatgagtcccctgatttgatcaccttagtgcccgggccactgtgtgttgtcatcccctcttcctgggtaatgtttgctgtcaccatttgtctctctggaggaagactggcacctgagggccctggggtagatggtactagaaagaaaccaggtgaccagctcccagaagtctggggtgctcatcctgtgtgtgacgtcagcagcactgtgatacctgggttcatctgatcctcagggccctgccccaccctccctgggtacccaggaccctctggttcacccctgtcccctactctctccacagctgccaccagaattgcagccggaagacctccctgcacttccccggagacgtgtttgccgctcccgagcaggttggaggcagccctgcccagggccccataccctacctggatgatgacatccccttgctggaggtcgaggaagagccaggtgagagctggcacaggcctgccctactgaccccagtgagacccagcgctgcctctgccaggggagtaacacttgacaagttggtcctgaggctgggggccggacaagatggcctgtgggcttcctcaccaggcatctgggcttccctggaagcgagcgtggaccacagtgggctttgattcaggctctgacgggccactgctctgccctggcagtgtcactggagctgggagacgtgtccctggtgtctgtgtcccccgagggtctgcagccagcctccaacacgggcagccgcggccatctcatcgtgcagctgcaggagctgctgcaccactgggtcctgtggtcagccgtcaagagccgctgggtgattgtgggtaagtgggccctccggccctgccccctgtctcacagctccacccccaaaacacacaggaactgggagcccaccccctctcgcagatgccccagggtcagaggcctgggctggggtctctccctctctgaccccccctctttcctgtgcagaatgaagccggtcatggcggctgttactcattggcccctgctgtgtgccagccactcacactgggcagtagcacagagcatgccacacatgggccctggagttagacccacttgagtctgagtcccagtttggccgcgtcctagctgtgtgaatttggctattccagtccgtttagcactcagttcctattctgtaattgaggatgagaacggtggctaggaaggcagctgtcagtggagagtatgtataaagacctcagcccagcgcgtggcgtgcggtaagtgctcagtgaatgtcaagtgctattatcattgtcatcttcgacactatttcagagttgtgtgagatcaagtagtgcaccagctcgtcataaactatgaggtgctctgaggtggtggccgcctcttgtccaggagtattagattatagcttatagtcaaaccccatgggacaccacaaagcaactgatccctggccctgtaggaccatccccagcaagctttgcccacgggctggcatgcagggccttcccccgcacccttaggacacccgccccccaacaaccagagcagttgtctcccggcactttggagccccactgggaacagaccagctgggcccagccccgcctggtgtagcgccctttcctcacagggctgttcgtctccatcctcatcttgtccctggtgttcgccagccggctccgccccgccagccgggccccgctactcttccggcctgataccaacatccaggtgctgctggacctcaagtacaacctgagcgccgagggcatctcctgcatcacctgttcaggtgaggcttctagccaggctgtccctggcccgctcaggtgtccgggtcccaaagactgttggtctgagagatgcaggatccagggtccccatcaatgccagacctcaggcaaatcccactcccctctgagcccccatgttcccacagttcattcaacagatgcctgctgggtgcctgctgggtgctggctctggggaggtactgtgggcgggaggcataggcttcccaagctcagggagttcacattccagctctagggcccggtcactgtaatagtagatctgagctttggcggaggaagaatagggtgtcttagaggcccacgtcatggaaggcttcctggaggaagtaacgtctaggccacaactcacaagaattgggaggagttagccaggctgggaggggagaggaggaaagaagaggggtcaaccaggtggggaggggaaaggagggaaggggtggggttaaccaggctgggaggagaaaggagggaagaggaggggttagccaggtgaggaggggagaggagagaaggggtggggttagccaggctgggaggggagaggagggaaggggttagccaggctgggaggggagaggagggaaaaggaggagttagccaggtgaggaggggagaggagggaaagggtggggttagccaggctgggaggggagaggagagaagaggagaggttaaccaggcggggaggggagaggagggaagaggaggagttagccagttgaggaggggagagagggaaggggtggggttagccaggctgggaggggagaggagggaaggggttagccaggctgggaggggagaggagagaagaggagaggttaaccaggctgggaggggagaggaggcaggagtctaggcagaggagagcaccagaggtgggaaagaccaatgccacatttgagagaggcagctgcaggaactaagtctggcccagtggactgggatagggcagatgggctgaagtgaggggtctggattttattctgattgtcactggaagctagtcacgtggtttaagtggagaagcggggtgagggagtctcccaggtgctgtgtggaggtggactagggcactggggtggaagctagctgggaggctgagagctggtggtgctgggaccagcatgctgatggcagcgatggtggagtcaagaggtttttaggaggtggtttccataggacttggtgacggagtgggagtcgggaatgagccaggagggaagacagagatggctccttgattttgaggtagctggcccaggccgcattttacagagggggagcaggcgaagtcaacccaaggtcatctgactttgccagggcagttagaaaccaaatgagaagacgcctgggtgagtgcttccagctcacaggagcagatctgctggtgctgtcattacctttatttaattagggcggtgctgagatcaacctggccttccccttggtaatggcagccaaatgcgtgataatccactgcagctccgagaggcaccagaagagcccctcacacttcggagccagccctggccacgtccccagctcctctaccccactgccaggatgtggcattgctccccatcatcaccgccgccacaggcctcctgcccttttttgtgacaaaccccgaagctccctgacaacatctggggccaggacccagccagagcccagccaggacccagccagagcccagccaggacccagccaggacccagccaggacccagccagagcccagccaggacccagccagagcccagccagggcccagccaggacccagccagggcccagccagagcccagccagagcccagccaggacccagccagggcccagccagggcccagccagggcccagccaggacccagccaggacccagccagagcccagccaggacccagccagagcccagccaggacccagccagagcccagccagagcccagccagagcccagccaggacccagccagagcccagccaggacccagcaaggacccagccaggacccagccagagcccagccaggacccagccagagcccagccaggacccagccaggacccagccggagcccagccagagcccagcccctactccctgtgcctcttcctctgggaactgcctcttggagggaccccttcagagtacagcagagtgcttcggctttacaaagggcaggcgaggccagaacccagcggggctgcaagtccctccctgggcaggtcctttcacctctgctttccactccatcaagtggggttcatgggaacagcctcaggatggctgtgaggattaaaactttgaaggtgtagttctctcatttctaatttaaaaaacccaaaggaagggctaacacacaacgcttgaggcaaaacaggaatatatgtctcccaccatgtctgccagctgatgaccttgggtcactctaacagtcactcctgttaattggatgcagaggatgtgatgtcccacccccgagggaagtgtggcatcatctccacccgacagaggcggcagagtggcacagagagggtgagcacgggggcagagtggcacagagagggcaagcgggggcagagtggcacagagacagcaagcagggggcagagtggcacagagagggcgagcagggggcagagtggcacagagagggcgagcagggggcagagtggcacagagatggcaagcagggggcagagtggcacagagacggcgagcagggggcagagtggcacagagacagcaagcagggggcagagtggcacagagagggcgagcagggagcgtttcagtgtttttctctgggcaggctgatggtgcctttctctgggcctaaaattcctataaatttggtatttgattttttaaaagttctttctagtttctttctgacccctgacacccaccccctccagtccctgggccccagttcctgagactgtctcagatcccagcctcttccctctgcccatcgggcccaggccaggatgtcctgctgtcctgctgtccttgacatggcgctggggggcaggtctgttccaggagaagccccacagcctgcagaacaacatccggacgtccctggagaagaagaggcgaggctcaggggtcccctgggctagccggcctgaggccaccctgcagggtgagcactgggggtggagggtggggaaatcctccctggtgctagggttgaaggccctgtaaggagagcagataaaattccttctggattctccttcaagaaggagattgtgtgttcctggtcactgcagaggagctggggatggggggtgaatttggggccctcacctcccatcccgccaggacagtaggctcccgcgacaccctggtctgtggtgcccccagagcctccctgtgcaccaaagccaccctgagtgtccaggggcagaggtgggcatcctgggccctgaacactggcttgtccctgctggagtctccctcagaggtgggtgctgggtcaagtgtactgggggaatgaatgccccatcaggcagctgtgtctgtccctgtcaccctatggcactgttgccacctctctcctactactgtcactcccagcaccagccctgtaccaacactagcacattttcagcaggatgccctccatcactgtcacctccgctatctagtccaccccatcccagtgactaccacctcccccaccatccctaccacccc

SEQ ID NO: 2046 - protein, 788 aa, Homo sapiens
MLLAFISSSCIAALVYILTSCSVFLSFFGIASIGLSCLVALFLYHVVFGIQYLGILNGVAAFVIVGIGVDDVFVFINTYRQATHLEDPQLRMIHTVQTAGKATFFTSLTTAAAYAANVFSQIPAVHDFGLFMSLIVSCCWLAVLVTMPAALGLWSLYLAPLESSCQTSCHQNCSRKTSLHFPGDVFAAPEQVGGSPAQGPIPYLDDDIPLLEVEEEPVGPEAGGRTRWPVGFLTRHLGFPGSERGPQWALIQALTGHCSALAVSLELGDVSLVSVSPEGLQPASNTGSRGHLIVQLQELLHHWVLWSAVKSRWVIVGLFVSILILSLVFASRLRPASRAPLLFRPDTNIQVLLDLKYNLSAEGISCITCSAKCVIIHCSSERHQKSPSHFGASPGHVPSSSTPLPGCGIAPHHHRRHRPPALFCDKPRSSLTTSGARTQPEPSQDPARAQPGPSQDPARTQPEPSQDPARAQPGPSQDPARAQPEPSQSPARTQPGPSQGPARAQPGPSQDPARAQPGPSQSPARTQPEPSQSPARAQPGPSQSPARTQQGPSQDPARAQPGPSQSPARTQPGPSRSPARAQPLLPVPLPLGTASWRDPFRVQQSASALQRAGEARTQRGCKSLPGQVLSPLLSTPSNPSLFPLPIGPRPGCPAVLLSLTWRWGAGLFQEKPHSLQNNIRTSLEKKRRGSGVPWASRPEATLQEGDCVFLVTAEELGMGGEFGALTSHPARTVGSRDTLVCGAPRASLCTKATLSVQGQRWASWALNTGLSLLESPSEVGAGSSVLGE

SEQ ID NO: 2047 - DNA, 1231 bp, Homo sapiens
  source (1)..(1231)
  CDS (201)..(1031)
ttgctgagaaacagagcctgtctcacattacacatgaggaaggtaccagataaatacagtacctgtcttcccagctggcctggagtggggatgaacataggacaaggcttatgtatcagaagtgttatcccagactcaaaatcaggaacaagtaatgcacaagaggaatgtgttctgagagcactgctggctgtaaaatgatgagttcctgggatagcagagctagctacagtggtgtaagcagggctcaccatggcaccaacagaaagggaagcggtggtagtggtagtggtgatggtgttagtggtggtgatggtggtggtggcagtggtggtgatggtggtggcggtggcaatggtaggggcagtggcgatggcagggaggtggcagtgatggtgatggtgatggtgatggaggtgatggtgatggccatgttggtggaagtgatggtggtggtagtgatggtggtgatggtgatggtggtggtcatgttggtagtgatggtgttggtgatggaggtaatggtggtggtcatgttggtggaagtggtggtggtggtagtgatggtgatggtgatggaggtggtggtggtggaagtggtgatggtggtggtgatggtgatggtggtggcagtgataatagtgatggtgatggtggtggtgcatgtggctatcgcagcagttgtaatggtgatggtgatggagatgatggtggtggttgtggtggtggaagtggtggtggtggtagtgatggtggtggtggtgataatggtgacggaggtgatggtggtggtggtggtggtggtagaagtggtggtggtggtagtgatggtggtggtggtgataatggtgacggaggtgatggtggcggtggtggtggtagaagtggtggtggtggtagtgatggtggtggtggtgataatggtgacggaggtgatggtggcggtggtggtggtagaagtggtggtggtggtagtgatggtggtggtggtgataatggtgatggaggtgatggtggtggtggtgttgtaagtggtggtggtgttggtagtgatggtgatggtggtggcagtggtgatagcgggagttgtgttggtgatggtggtggtggtggtggtggtaatggtggtggtggtgatggtgatgaaggtggtgatggtggtggcagttattatggtgatattgatggtggtggccatgacgggggtggtggcagtgatggtgatggtgat

SEQ ID NO: 2048 - protein, 276 aa, Homo sapiens
MSSWDSRASYSGVSRAHHGTNRKGSGGSGSGDGVSGGDGGGGSGGDGGGGGNGRGSGDGREVAVMVMVMVMEVMVMAMLVEVMVVVVMVVMVMVVVMLVVMVLVMEVMVVVMLVEVVVVVVMVMVMEVVVVEVVMVVVMVMVVAVIIVMVMVVVHVAIAAVVMVMVMEMMVVVVVVEVVVVVVMVVVVIMVTEVMVVVVVVVEVVVVVVMVVVVIMVTEVMVAVVVVEVVVVVVMVVVVIMVTEVMVAVVVVEVVVVVVMVVVVIMVMEVMVVVVL

SEQ ID NO: 2049 - DNA, 38918 bp, Homo sapiens
  source (1)..(38918)
  CDS (201)..(228)
  CDS (8843)..(8927)
  CDS (19620)..(20268)
  CDS (25302)..(25419)
  CDS (26738)..(26852)
  CDS (31546)..(31644)
  CDS (38460)..(38718)
agacttaatggacagaggctactgtagtcctgaactgagacaagactgccttggccagtggagatggagaaaaacagtaaaagatacctgggagtagtagaaacagttaagttccagatcacgcaggcccgtgtgcgcggcaccctggccaaagagggacagctccccaagcgcagggactcagcttcctgtgcactgtcatgacgcactgcctgacccaggggtgcagtaagtccctgctgactggatgtctgaatgcagcacttgcagaactttgtctgcttctgagactttttgcctctcccctcccctccactaccttttcttggtcatatggtcaagaatatgtttcattagttctgtttgctttccatcttacctttgtatttttacttgtgtttgcaagcatataccttttccctgatttttcctggctaagcaaatgtgcctagccgccatgccaatgccacactaccaccggaacacatcccctagcaccttctgcctgtcaacttattcctcaaccagcacacaaagcaagttaattctaaagagttctcgtggcataggtcaagcccgggacttctgacactcttctctgttgctaagtaagatgccaataggaaatcagctgcgtgttagctgccactttatgcactgttgagttctcaaagatggttatgtcacacaacaaagtactggcctaaaacccaggttcctgtcttgacttctccctttttttttttagacacagagtcttcttgctcttgtcaccccaggctccaggctagagtgcagtagcaccaatcttggctcaccgcaacctccgtctcccgggttcaagcgattctccctgcctcagcctctcaagtagctgggattataggcaggcgccaccacgcctggctaattttgcatttttttagtagagatagggtttctccatgttggtcaggctggtcttgaactcccaatctcaggtgatccgcctgcctcggcctcccaaggtgctgggattacaggtgtgagccaccacgcctggctgacctcccactttctataggaaggattcacttcacttccctgagctttaagttccttgtcagtatatgtgaggccatgccagagcgcactgtagtgctatgcacacctaagggactggttagtagataccatttcgtggcagcaaacagaagccgaggataagggggctctcttacaagtgaattcaaaatttgggttaatagtaaatgtcagttttttgtttttttgttttgaggcaaagtcttcgtcacccaggctggagtgcagtggcaccatctgggctcactgcaacctctgcctccagggttctagcgattctcctgcctcagccttccgatcaactgggattacaggcacctgccaccacgcccggctaatttttgtatttttagtacagacggggtttcaccatgttggccaggctggtctcgaactcctaaccttaggtgatccacccacctcagcctcccagagtgctgggattataggcgtgggccactgcgcccagccaattttgtcagttcttatgctgcaacagtcaagtatgtgatgtgtatcctcttgtttttaataaattccaaaaacacactaatggaagtttaatactgtttgttgcttatccatctctaggtctcaagagatgtcttaactatgctgtgaaaagtaagaactctctttaagaggatgtttcttggctgggtgcggtggctcacgcctgtaatcccagcactttggtaggccagggcgggtggatcacctaaggtcaggagttcaagaccagcctgaccaacatggtgaaaccccatctctactaaatacaaaaaaattagctgggcgtggtggctcatgcctgtaatcccagccacttgggaggctgaggcaggagaatcactaaaacccgggaggcggagatttgcagtgagctgagattaagccactgcactccagcctggacaacaacagtgaaactccgtctcaaaaaaaaagaggatgcttcttcactattagggaccctaaaaaataaaataaaaggccatagagtttcatcttccagagcaattcacagttgactagagaaaagccatattcatatatctactggttcaagaatcaacatgtattttaagctagtctctattttggttcttaatttcatcacataattaatagttttaggatatactggagcttttctcttaaaaataagtaaagctcctagcacagttttgtatttcttatatagtttttttttaacttttcatcttgatgtaattatacactcaaaagaagttgcaaaatagatcccctatgcccattacccagattcccccagtgatgacatagaatttatcaaaatcaggaaactgacattggcacaatactcatgtaggattttatctggaagtagttactatcaaaatgaacttaggtgctactttttcaaattaatttagaaattaattttggccttctggcattttgtaaaaagctaataaaactctaaaaatatgttgtcaggctgggcatggtggctcacgcctgtaatcccagcactttgggaggccgaggcgggcggatcacctgaggttgggagcttgagaccagcctggccaatgtggagaaaccccatctctactaaaaatacaaaattagctgggtgtggtggcacgagcctattaatcccagctacttgggaggctgaggcaggagaatcacttagcctgggaggcggaggttgcggtgagctgagatcgcaccattgcactccagcctgggcaacaagagcaaaactctgtctcaaaaaataaaaaaataaaaaaaaatatatatatatatatagagagagagagagagagagagagagagagagagagagagtcatgtaaataatgcattatggccattgtcattgaaaagataaaattaaggcatgttaactttgatctgccatggtttcctgcaaggttaatttgcatttgctctaataaaaacagtcctttacacttttaagaattcatggccgggcacggtggctcacgtctgtaatcccagcactttgggaggctgaggcgggcagatcacgaggtcaggagttcgagaccagcctggccagcatagtgaaacccccatctctactaaaaatacaaaaattagccaggcatggtggcgtgtgcctgtagtcccagctactcgggaggctgaggagggagaactgcttgaacccaggaggtggaggttgcactgagccgagatcacaccactgcactacagcctgggcgacagagccagactctgtctcaaaaaaaaaaaaaaaacacacacacaaaaaaacatgaattgtttttctcttaagggcctcaaatatctacagccttgaggttccatattttcaaattggaagtgcgtgacaagccaggaggcatagtgtgaatttctaacttagtactagagtttcgaggtattcttatccttaggaaaataagttttgttcaaactaaaatacagtcaaggacttgttttctttagactagatcaattgacaaacaacctggcccttttcctctcggcatgtgaatcatacaacttgttaaagaggagtattgggttttattcggagaaaggaggagaggagagtagaattgggtagaaggttcaatttgtctgaacttggttggcctcacccttcactgcttgttaactacatgaaatcatgatttagccatgtctaatgtaatttgattgctgggaggatgcaaattttcatgtttgcttttcacctgaatgtatcaaatttcactatgctttaacctcagccactaagaagctattactagagcgtgtttaaacaagcttacttctgccgtcatgttatctgtccagaattcagagtggcaaaccatacttggtgtgtatgtttttctgcacctgaggaaatcatttacattaaggcagctctgtgatagtcagtgttcctcagcgtccccgccacatggcagcaggtggggttttggtgtggggagggggctcgggaatggaaagaaaggactcctttccaggtactagtttgcacttgtcttagagagagagctgtgggggctgggcatggtggctcatgcctgtaatccctgcactttgggaagccaaggtgggcagattacttgaggttaggagttcgagaccagcctgaccaacatggtgaaatcccgtctactaaaaatacaaaaattagccgagcatggtagtgcatgcctgtaatcccagctactcaggaggctgaggcaggagaatggcttgaacctgggaggcgaagtttgcagtgagcggagatcgcactactgcattctagcctgggcagcagagcaagactccgtctcaaaaaaaaaagaaaaagaaaaagaaggccaggcacggtggcttacgcctgtaatcccagcactttgggaggctgaggcgggtggatcttgagaccagcctggccaagatggtgaaaccccgtctctactaaaaatacaaaaatcagccgggcgcagtggtgggcgcctgtaatcccacctactcggaggctgaggcagttgaactcgtgaggcggagttcgcagtgaaccaagatcgcgccactgcactctagcctgggccacagaacaagactccatctcaaaaaaaaaaaaagaaaaggaaggaagggaggaaggaaaggaaggaaggaagctgtgatctcaggctatcagtttagcgtgcctctctttggcccatcacctctcaccctgggaatcctgaaacctaccaggaaccgcaagcaagtaaacctgtagcaagctccctaaaacagcatccaggaaaacacttatatttgttctttttttccccgctaaaaacgctgtctcactgagggaccagtcctgaggaatgtacatgttatcagttaacttgacattttgctctgttgtagaaaggcaacgccttcattccttggacataactctgggtcctcgtcaaataaacaccctagtcatgcttcatgcctatttcttcattttacagtcatgagggtttagcccagtgccttcccctgagactgcatgacttttgtacactcccctcttgtgtaagtcagagtgaatcgtgtctttctggcccgagccccaaaccttccttgggctgagcctcagagccgcctggggtgcaacatgcaggaagctgtgttttgtgttttgaattcctggctgtcctgatgttcttggatgaaccggtgtccttgtacacagtgtctctacttagtgattgataaaagttcttggctgggcagaagccagttgacagttcctgcagttgggtgagtcacgggagcctccgctcatccgctccgggctgcagaggcaactccaggcacccacagcggctcagacgcgtgataagacttgtctgcacaccacatcatcccagcccaggagcctctaattacacgtctggtgtttgcaggagcccaggtggcctgtgcttccatgggctgagaactgtgaagatagcacgggctgggttctcactgccagcgcagaggccagggtgggggaggcacctcaaagtcctaatgcgtcacctcaataccaatgataatacccgcattctaaagaaaacaacagtccatttaatcatgcgcttcttgttttctaaagcactgctacaattttatcttcccatagacatttcgagcccttgtttgtttgtttgtttttacatctcacctttccattcacccttcttagtacaggcagaaaactacctggcactgtgggagactgagtataggagaaagcaggatgacgatgggcctgaatggtggtgtgttttcctccacacaatgtggctttgtcctccaaggtgtctcacgtgatggaagctggctgatctgacttgcttgcagatgtctgtaacagcattagcagcttccaattgtcaggagctcgctgcttgccaggcacgctgtcgggcacactgaaatgttgtgggatggcgctgggatcagccctagaaccatgagacctactttcacagaaaggacactcattcagagcagggcaaggaagtcactgtcaccgagaccaacactgctcctggcccatgccagtcagtggctgatggacgaagctgcactgtgggacagtgaaatgcgacgtttgttgatcctgtcaggaacatcgtctgtgcgggaggcttctgaggacagcagccagaaatctgttttgtttttgttttcacagttacatatttttttttcttccatgcttagctgatgctgaatcaattcgactgttccttttgtaagagtccacaaaccttaacaataatagacagtcatttgtcatctggcaagatgagattgagaagattctcagtgagaaactgaatttacccaactgaaatgttcacttaaagtttttttcctctaaaacctggactactcatctgtggatgacttctactcatgtaattttttttctcaaattggatacttaaatgattctatgtatttagtaatcgcaaaaagtcagttttatggatacagttttctctgaacagttttggtatagacaaaaagaggtgttaccatccacccggcgtgcattataattctgtccttgcctaatccccacccaaatgcccatttccatctacacgaactcattctttctgaatcataaatgccacaccctcagttgcacataaaactttgccatattatgtatacatcagtgtgtacgaagacaagttgtggcttagaagcagtccatttacagtttctggaactgtttatcatctcacttctccataactgattctaggtctgaaaggtttccttctaaaatttgatagcctgattttgaggatatgttttcaatgccttttctggttacaaatcctgatgttggcaggtctttttcctgtaagcatgaagaccaaccaagacaaggtacactgtgctgttaatcaaagtggcacagaacaactatgtgacaggtcatagccaggagtgtaatgtaacatggatatggagggccacaaagagtcccatagccctcctgctacacatctgaaaatctcctgaaattcagaataaacccattactgaaaaacaaaagtgtttattggcataccagactgtttcaggaattcatgaaagatagaaaacagatgggtcttgtgtgatggagaaataagaccaaagaaaagaccaaaggctaaaagatctacaggaggggccgggtgcagtggctcacgcctgtaatcccagcactttgaaggccgaggcgagtggatcacttgaggccaggagtttgagaccagcctagccaacatggtgaaaccccatctctattaaaaatacaaaaattagccagacatggtggctcacacctgtagttccagctactcgggaggctgaggcaggaaaattgctgaacccaggaggcggaggtttcagtgagccgaaatcttgccactgcactccagcctgggggacagagtgagactccgtctcaaaaaacaaacaaacaaaaaaatctataggagatgacttctgtgaaggtggctgtgagttctgagaaagctctgccctttatggaaatagggaacaggaaggagccctggggcaggagtcagggtgattatctgggggcttttggaggatcagccagctgccttcgcccccttccccacctctctcatgctaaactgtgtcacagtgagtatgtgcacacaggccagagcactggtgacaagaggcacagcaagaccctgggtagcaagaaatctgcactatttctaggtgggctagaaaggccctcctgactgagaggactcagccttcctcacactgccctgtgtttcctctgctgtggttatcagaggcaaactcatgtcatcagaacctggttcaacagacaggagaataggaattttgaaatatgagcccaaaatttaaattgcgaagcatttgaggaaaattaatatcaagaaaagtacaaaactcaataaacatgcaactccccatgcaaacatttcacaaagcaaacatgttaaaacaatccttggagattagacagaacattatattcgtgaaataagaacaggctgttaggctgggcacggtggcccctacctgtaatccctgcattttgggaagccaaggcgggcagatcacaagggcaggagttcgagaccagcctggccaacatagtgaaaccccgtctctactaaaaatacaaaaattagccaggcatggtggcgtgcacctgtagtcccagctactcaggaggctgaggcaggagaatcgcttgaacccggagggtggaggttgtggtgagccgagattgcgccactgtactccagcccaggcaacagagactccatctaaaaataaataaaaaataagaacagggcccactgcagtagctcatgcctgtaatccgagcactttgggagcccgagccgggcagattatgaggtcaagagatgaagaccatcctggccaacatagtgaaactccgtctctactaaaaatacaaaaaaaattagtgggcatggtggcgggcgcctgtagttccagctactcgggaggctgaggcaggaggagaatcgcttgaacccaggaggcagaggttgcagtaagccaagatggtgtcactgcactccagcttggtgacagagcaagactccatctcggaaaaaaaaaaagaacagattttgttttgttttgttttggtttgtttgttttgagacgggagtctcgctctgtcgcccaggctggagtgcagcggcgggatctcagctcactgcaacctctgcctcctgggttcaagcgattctcctcctgcctcagcctcccaggtgcgtgccaccaagcctggcaattttgtgtatttttagtagagacggggtttcaccgtgttagccaggatggtctcaatctcctgaccttgtgatccgcccacctcggcctcccaaagtgctgggattacaggcgtgaatcaccaaacccggccaagaacaggctgtttagtaaaaatgccaagggatagaaagtgtgaagaaaggttaagagacatttggaatctgagaagagtacagagtggtggcatagattaaataattaaaatataacatgaaaatttctccgatctgaagaaaaatacaagtcttcatgtggaaagggccctctgaacgccaaatgatttgcttgaaaataagactacgcctagacacgtttcccaaaatttcggaacaccaaggataagaagaataaagcttccaaagagaaaaacaaaaagcaaaaagtcacctacagaggagtaagaattatacaagccccagcaacacagaatgctaaaagaaaatgcaataatattaatatcatcaaagttctaagaaaaaagttaggtcgcacgcagaaactcacacctataatcccagcactttgggaggccaaggtgggtggatcacctgaggtcaggagttcaagaccagcctggccaacatggtgaaaccccgtctctactaataacacacacaaaaattagctgggcgtggtggtacacacctgcaatcccagctatttgggaggctgaggcagtcgaattgcttgaacccggtaggcggaggttgcagtgagccgagatcgcgccattggactccagcctgggcaacaagagcgaaactccatctcaaaaaacaaaacaaaaaacaaacaaacaaaaacacgttattttgaacccaagtcctgtactctctactcagccaaattactattcaaatgaaaggtcaaaataaaatacctgggggtatacaaaacctcaggaagtttgtcacattcagatttgctctctgaaagaattgctcaaagattgcaacctaataagactaagagaatccaggcgctgggtgcagtggctcacggctgtaatcaaagttctaagaaaaaagttaggtcgcacacagaaactcacacctataatcccagcactttgggaggccaaggcaggtggatcacctgaggtcaggtgttcaagaccagcccggtcaacatgaggaaacctcgtctgtactaaaaataaaaaaattagccaggcgtggtggcacatacctgtaatcccagctacttggaaggctgaggaaggagaatcacttgaaccggggaggcggagattgtagtgagctgagatcacgccactgcactcatgcctgggcgacagagtaagactgtgtctcaaaaaaacaaatccaaaaaataggaaaatgtggtatccagtgggcaattataagcaaagcagccattataacttatagttaagtttaagtaattttaaaattttttttaatttttaatttttgcgggtacatagtaggtgtatatatttatgggatacatgaaatattttgatataggcatgcagtgcataataatcacatcacggagaaggttttttttttgagtcagagaagtttaagtaatttttatgtataactaaaaaattaataataatagagaactaagatctgggattgcaaggagaagttcaaggatgcttaattcaaggagaagaagaatgaggactgaagtgagaacagactaaggtttttatctttttggaggaaaggatagaattgattaattctggtcattgaaaaatttaggggctgggtgtggtgagttgcgcctatatcccaaggtcaaggcaaggaggatggcttgagcccaggagtttgagaccagcctgagcaacgtagtaagaccttgtctctaaaaaaaaaaatacaaaaattagctggacatggtggctcatgcctgtagttccagctacttgggaggccgaagtgggaggatcgcttgagcctggaaggttgaagttgcagtgagccaagatcacactaccgcactccagcctgggcaacagagccagatgctgtctcaaaaaaaaaaaaaaaaaaaaatagaaagaaagaaacttagttgccactgtaacagtactaagagatgtgacctttaagaggtgtttagatcatgagggtgccacccttgtgagtggactattgtcagactgcaggaatgggttctcattatcacaggagtggcttcaacccctcttgctctctctcctacttttcttttcttttcttttcagacagagtctcactctgtcatccaggctggagtgcagtggtgcaatcctgactcattgcaacctccacctcccaggttcaagcaattctcctgcctcagcctcccgagtagctgggattacaggcacctgccaccacgcctcgctaatttttgtatttttagtagagacaaggtttcgccatgttggccaggttggtctcgaactcctgatctcaggagatccacccacctcagcctcccaaagagctgggattacaggtgtgagctccctcacctggcctcttctactttttctttgcttttccaccacgtgatgtcttctgccatatgatgacatagcaagaaggccctcaccagatgctggcaccttgctatttgacttcccagcctccagaatggtgagacaataaatttctgttctttataaattacccagtttcaggtattctgttatagcagcaaaaatgaactaagacaaaaaaaaaaagaaataaaacatctaaaaataaaatttacatataataattaaaattattataccaatggatgcattagccaccagaatgaacacaggtaaaaaaattgtgagagctgggcacagtggctcacgcccgtaatcccagcattttgggaggtcaaggcaggtggataatttgaggtcggaagtttgagaccagcctggccaacatggggaaaacctgtctctactaaaaatacaaaaattagctaggcagtagtggtgcacacctgtaatcccagctacttgggggactgaagcaggagaatctcttgaacctgggaggcggaggttgtggtgagccgagatcataccactgcactccagtctgggtgacagagtgagaccctatcccaaaaaaattaaaaaaaaaaaaaagaattatgaactagacagtggatctgaaaatattacacagaaaacaatattatacagaatacagtacaaaaaagtaaagaaactgaaaatatgaaaaagaggttaagagatatgaaagtgtcttagttcatttagtgttgctataaaagatacctgagaatacctgaggctgggtaacttataaagaaaagaggtttatttggctcacagttctgtagactgtacaagaagcatggtgccagcatctgcttctggtgaggcctcaagctgcttccactcatggcagaaggaggggcagctggccttgtcacatggcaagggagggagcaagagggaatggaggaggtgcgaaactctttttaataatcagctcttggctgggtgtggtggctcatgcctgtaatcccagcactttaggaggccgaggcaggtggatcacctgacatcagaagtttgagaccagcctggccaacatggtgaaaccctgtctctactaaaaatacaaaaattagctgggcatggtggcgtgcacctgtaatcccagctactagggaggctgaggcaggagaatcacttgaatccaggaggcagaggttgcagtgagctgagattgtgtcactgcactccagcctgggaaacaaagcaagactccatctcaaaaaaaaaaaaaaaaaaaaagaaagaaaaaaaaagaaaaaagaattgcgaacaggtagtgaaataaatggttgtacatgaatgctcatagcagtggtattcacaatagccagaagacaaagccaaatgtctatcagtggataaatggataaacaaaatgtggtacatccatacaatattactccattatgttatatgattccatttacatgaaacatccattataggtaaatccatagaggtagaaggtcaaatagggtttgtcagaggctgtgggagagaggactggggagtgaggatgacttctaatgagcaccggatctactctgagggatgaaagtattacggagctggacagcagtgaggactgcacattatgaatgtactaagtgcccctgaacagtctgcttcaacatggttcattctgttagatgaatttcagctccgtttttaaaaacttgacacccaggtggatttaggggaaatttccatgaaacattcaaagaataggtatttcttacccttcagaaatatttatatagaaaagcagaagagggatactcccgatatagttaggatatttgtccccacccaagtctcatattgaattatccccagtgttggaggtggggcctggtgggagacgtttgggtcatggggacggatcctccatggcttggtgcagttttcttggtagtgagttctcccgagatgtggttgttgtcaagtgtgtgtggcatctactccccgacccccatctcttgctcctgctcccaccatgtgagactcctgttatcacttcatcttccaccatgagcaaaagctccctgaggcctccccagaagccgagcacatgccagggccatgcttccagtacagcctgcagaaccgtaagccaaatcaacctctttctttataaattacccaatctcaggtatttctttatagcaatgcaagaatggcctaacatgctccccaactcaagacacgactttaggccagggacggtggctcatgcctgtaatcccagcactttgggaggccaaggcaggcggatcacaaggtcaggagattgagaccatcctggcaaacacagtgaaacactgtctctactaaaaatacagaaaattagccgggcgtggtggcgggcacctgtagtcccagctactccggtaggctgaggcaggagaatggcacgaacctgggaggcggagcttgcagtgagccgagattgcaccactgcactcaagcctggggaacagagtgagactccatctgaaaaaaaaaaaaaaagataggacttcagcgtaactgtgattccaaaactgtacaaagacagtacaagaaaggaaagtttcagttcaactttacccatgagatgtaaaaacccttaaattacatacttatcaaatagaacctggtaatgtataaaaacataatgaccacattgggtttacttcaggcatgcaagactagttcattagaaaatctactgacataaggctgggcgcggtggctcacacctgtaatcccagcactttgggaggccgaggcgggcagatcacaaggtcaggagatggagaccatcctggctaacacggtgaaaccccgtctctactaaaaatacaaaaaaattagccaggcgtggtggcgtgcacctgtagtcccagctgctggggaggctgaggcaggagaatggcatgaacccgggaggcagagcttgcagtgagctgagatcgcgccactgcactccagcctgggcgacagagcgagattctgtctcaaaaaaaaagaaaaagaaaatctactgatataattcaccatggtaatagattaaaggagaaaagccagaagatgtcactgatgatggaaaaccattcaataaatttcaacatctactcatgacaaaaactcttagcaaaccaagaatggaaagcgtactttatttatttatttatttatttatttatttattgtattattattattatttgagacagactctagctctgtcacccaggctggagggcagaagaaaggtcagagagacttgaaggggatccggacaggccaccacagaatatgcgactttgacataaagattattttgagctgaaggcaattgagaatcaacagatccagaaagagttctctgccctccccctttttgcctaaaagcaggtcataaatttgatcacaccagtgtactccagcctgcgtgacagaggaagaccctgtctcttaaaaaagtaaataagtaaataaaagtatctgtatttctatataccagcaacaatcagaaaacaatttaaaaaaggaattaacaatgaaaaagaaaggaaggaaggagggaagggagggagggagggaggaaagaaagaaaaaggagaaagaaggaaagaaggaaggagggagggagggagggaaggaaggagagagagagaaagagaaaggaagaaagagagagagagaaagagaaagaaagagagagagagaaagagaaagaaagaaagagaaagaaggaaaaggaaaaaaagagaaaaagaaaaggaaaggaaagggagagagagaaagaaaaggaaagagagaaaaagaaagaaagggagagagaaagaaagaaaaagaaagaaaagagaaagaaagagaagagagaaagaagaaagaaaaaaagacagacctaataataccaacaataaatccaaaagatgtgtaaacgcttaatggggaaattacaaaactttattgaaaaacattaaagttggcttatgcgtgggtcaaccatagtggctcacgcctgtaatcccagcactttgggtggctgaggcaagtggatcacttgaggccaggaattcaagaccagcctggtcaacatgatgaaaccccatctctattaaaaatacaaaagaattagccaggcatggtggcacatgcctgtaatcccagttacatgggaggctgaggtgggataatcgcttgaactcgggaggtggaggttacagtgagctgagatcgcgccattgcactccagtctgggagacagagtgagactctgtttcaaaaaaaaaaaaaaacaaatcatatcagcagcaacaacaaaaacccgattcaaaactgggcaaagtgcacacttcagtagcacatatactaaaaatggaacaacacagattattagcatggcccctggaaaaaaaaatttaatgggcaaagcacttgaatagacatatctaagatgtacaaatggccaataagcagatgaaaagatgctccacatcattagtcattaggaaaatgcaaaccaaaaccacaatgagaatgaccatatgattcagcaattccacttctgcgtgtataccccaaagaatcgaaagcagggtccggaagagctgtggacaccatgttaacagcagcattattcacaatagctaagaggtggaagtaacccaagaatctataaagggatgaaaggataagcaaaatgtggaacatacatacacttaaattttattcagccttaaaaaggaaggaaattatgggctaggggcagtggctcacgcctgtaatcccagcactttcagaggccaaggcgggcggatcatttgatgtcaggagtttgaggccagcctgaagaacacagcgaaaccccgtctgtacaaaaaatacaaaaatcagcctggtgtggttgcgcgcgcctgtgatcccagctacttgggagctgaggcaggagaatcgcttgaacctgggaggcggaggttgcggtgagccaagatcacaccaccgcactctagcctgggcaacagagcgagactcggtctcaaaaaaaaaaggaaggaaattctaacacatgccacaacatggacgttgaggatgatttgctaagtaaaataagccagtcacagaaagacaaatactatgtgattccacggagaggaggtactgagggtactctcattcacagagagagaaggtggaatggtggttgccaggggctaggggtagggggaaggaaagttagtgtttactggatacagagtctcagttttacaagatgaaaaagagttcgggagatggatggtgctgatgcttgcacaacgggatgaatgtatctaataccaccgaaccgtatacttaaaatggttaggatggtacatttcatgttgtatgtattttactgcaataaaaaaatttaatgggggaaatccattaatagaggaatgcccaggagtttgagaccagcctggacaacatagtgagaccccatctctacaaaaaaatacaaaaaaattagctgggtgtggtggcatgtgcctgcagtgccaggtacctgtagttccagctactgggggtgaaggggcgggcagctgaggtgaaagaatggcttgagcccaggaggtggaggctgcagtgagtcttaatcgcaccattattctccagcctaggtgacagaacaagactcagtctcaaaaaaaaaaaaaaaaaggttaaattacagtgtggttatactataacattctgttcaaccattacataaacaaagtggacttgaacatgagcagatttctaagacatactgtttcaaaaaattcaatttgcaaaacaatatactcaataggatcctatgtattttattttgtttttatttatttatttattttgagatggagttttgctcttgttgcccaggctggagtgcaattgcgtgatctcggctcactgcaacctccgcctcccgggttcaagcgattctcctgtcttagcctcctgagtagctgggcttataggcgccggacgccaggcccagctaatttttgtatttttttttttttagtagagatgcggtttcaccatgttggccaggctggtctcgaactcctgacctcaggtgatccacccacctcggcttcccaaggtgctgggattacaggcatgagccactgtgctcggccttactttatttttaaaaaattgacacaataatgtacaatctctgtgtatgtataaaacataatgtgtgtggatgtgtgtgtagagttacatatttgtaaattcctagaaaacagactgtaagcgagacctcaaagtgggactttggggaaaggaagaggaggtaggggagggagggcgggacagagaactttcaagtcttgctttatgtattcatgtatcatttgagtctttcccaatgaacaggtattggtgtatttgttgtataattacatttttaagtgctttaagacccaggtggcgctgagctagatgcctcatggactaatgacatggtattatccaccatccggagataatttactctttcataagtgtgctgagtggctggcattcctcaataagggatgtagaagcataagcaagtattagaaaagaggatgatctcactcttgcctgtgacctttgtaagttttattcttgcactgatttactgctgaagcccaaatttgaggcctgaccatccttttattaccatcatcctttaacttgcccccggctgtcaagttatctgtaacaaagcttcctcccagtcaccctacctgcctcagctagtcactcagcaatgcaaatagagagaattctgcattttgtaagactgaccacatagcacagtagggccccaggcgccaggcaggcagggcctaagaccgccgcacaacagatacggagggctggagggaggaattttcaggaccaggtgaatacgggactgtcgccaggccacattccatctaggtctaaaaaacaaggaaacagcctggagcagcggctcactcctgtaatcccagcactttgggaggccgaggtgggtggatcacctgaggtcaggagttcaagaccagcctggccaacatagtgaaatcccatctctactaaaaatataaaaattagccgggtgtggtggtgggcgcctgtaatcccagctacttgagaggctgaggcaggagaatcctttgaacccgagaggcggaggttgcagtgagcggagaccgcaccattgcactccagcctgggcgacaagagtgaaactctatctcaaagaaaaaaaggaaacataactttctcttcagtatactttgtgaaatcttattctcttctggaaagaagaaatctgaaccaagcacacttgttatggcttacttacctttgcttgcctttaaagaaaaccactgaagcaaagatgtgaaatctaaagagggcaacatctcgctcctggctgctgtcttccaacacaggctctcagattttaccatcatcaatccaagttttgtgtctggaggttgcacctccattagccacaattttgtcttttcttctttattttttaagacaatgaactttcaagtctcatgttatttttaagccaagtaaaaacctccaggagcaggctgaatttaaaaacaaaatacttgccgggcgcggtagctcacgcctgtaatcccggaactttgggaggctgaggtgggtggatcacgagatcaggaatttgagaccagcctggccaacgtggtgaaaccccatctccaggaaaaatataaaaattatccggacgtggtggtgcatgcctgtaatcccagctactcaggaggctgagggaggagaatcgcttgaaccagggaggtggaggttgtagtgagccgagattgtgccactgcactccagcttgggcgacaagagcaagactctatctcaaaaaaaaaaaaaaaaaaaaaaagaaaagaaaccctgagaatgtgatcacatgcagaattgaaacagcaaagcaaaataaagcagctctgtgaagtagctgaatgtctgaggcccagcaggtatgcagccctgtggggagatcccatctgatcagctggtccgggacttgtttgggaacctgcaagctgcaagaagtgaaaaagatgatgatggtggtgataatgatggtgacggtggtggtggtggtggtgatgctgatggtgatggtggtggtgagggtgatggtgatggtggtggtgatggtgatgatggtagtggtgagggtgatggtgttggtagtggtgatggtggtggtgagggtgatggtgaaggtgatgctggtggtgatggtggtggtggtgaaggtgatggtggtggtgatggtgatggtggtggtgagggtgatgctggtggtgatggtgatggtggtggtgagtgtggtgatggtggtggtgagggtgatggtgagggtgatgctggtggtgatggtggtggtggtggtgaaggtgatggtggtggtgatggtgatggtggtgagggtgatgctggtggtaatgatggtggtgatggtggtggtggtgagtgtggtgatagtggtgagggtgatggtgagggtggtgagggtgatggtgatgacggtggtagtgatggtgatgatggtgatggtgatggtaatgatggtgatagtgatggtggtggtggtgacaacagtggggatgttgatgatgatggagatggtgatagtgattgtggtggtggtgatggtgatggtggtgaatccagcattcacattcttcccagtgctaaagaccttccttagtgctcagtcccataagagcccttggccccagcctggatgccttgggactcaagctagggtctgggaaaagggccagctctggaaaggcctcatgctggaaccgtgaagaatgtgtccagcccagatgtgaaaaggaacagccccttcctctgcactgtgctgacagactccttgtgtgcatggggaagatgctgtagctaataaacagggaagagtctgagagcagcccagatcccccccagcactccttgaatgcccaggtccctgctgctgcttccctctaaaaagggagggtgttttctaaaaaaaacaagctaattctacaggagaactgactgcaggagaacatgatgtcctcctcattccttaggaaaccaacaccctagaatatagagtaagtaaccagactcagatgatacagttggctactaaagtaaaatcatattttacatttgatgttgcagttacagaaatgaatcctatggcataggcccagtaggctcttgacctctagaaagactttcttctctgcaatggatgataccaatgaccactttttctagggttactggtcagacagagttggagatgcagcacataaatgtccacaaactggtagaagttctcgaagatatgacaagtgaaaaagcaggggcagaagaatgcaacccctcttgggattctggatagaagttgatccttttgtataaagagtgaaagaaaatcggctgggcacagtggctcacgcctgtcacaccctcacccccaaatcaggaggagcacagtcaagccacctgccacacatcttaatcacacatctgaattctgactccaggtcacttttcaactgtagatagcacccctcccacttaagttcccaatttttgtttgtcccctccccgaccagaagtttaggaagcaagtttgttcagcctgggaaagaagtggacagataagagagagtggaggttttaaaaatgttatcaacatgccaaaagctagtcattcaagaaggaccagaaaaagcccaaggtttagataaagctggttcctggagcccccatcccaaacactgtcagagaaagggaaatgaatcttcactacaatgcctgggctctgataatactgatttaccttagagatgctcttttagaaatgctcatctagaaacaccttttcctgctgccctgagggcacaaaaactcaaagagccaatttctttcactatctcccttcctgtagatatctctaaaattccaaggagcttattcagaggtaagggatgctggcaaaacacctagcaaacttgagagagtttacagttgttcactattagtaataagtggttttcagatcagcagtttcactttttgttctttttttttgagacagaatctcactctgttgcccaggctggagtgcagtgctgtgatcttggctcactgcaaactctgctgcccgggttcaagcgattctcctgcctcagcctcccaagtagctgggattacaggcgtccgccatcacgcccagctaatttttgtagtttttagtagagacagggtttcaccatcttaatcaggctggtcttgaactcctgaactcgtgatccacccaccttggcctcccaaagtgttgggattacaggcattagccaccgcacccagcctgtgactttcaaatagcaggtatccgccgggcacggtggctcatgcctgtaatcccagcactttggaaggctaaggcagacagatcacctgaggtcaggagttcaagaccagcctggccaatgtggtgaaaccctgtctctactaaatatgcaaaaattagctgggcatggcggcaggcaattgtaatcccagctacttgggaggctgaggcagaattgcttgaacctgaaaggtggaggtcgtggtgagctgagatagggccattcattggacttcagcctgggagacagagagactccgtctcaaacaaacaaaacaaatagcaggtatccagtaaacaaacagcaggtgtccagttttctttccttattaaaagtgggctgggcactgtggctcacgctgcaatcctagcacttgggaggttgaggtaagaggatcacttgagcccaggagtttgagaccagcctgggcaacatactgaaaccctatctctacaaaaaataactagctggacatggtggtgtgtgcctgtagtctcagctacttgggtggctaaggcatgaggatcgcttgagctggggaggaccaggctgcagtgagccatagttgcgccaccacaatccagcctgggcaacagagcgagaccctgtctcaaaaacaaaacaaggccaggcgtggtggctcatgcctgtaatcccaggactgtgggaggccgaggcaggcggatcacttgaggctatgagtttgagaccagcctgggtaacacagtgaaacctcatctctacaaaaaataccaaaaattagctgggcacagtggtgcgtgcatgtagtcccagctactcaggaggctgaggcaggagaattgcttgaacccaggaggcagaagttgcagtgagccgagatcgagatactgcactccagcagactagagtgagatcctgtctctaaagaaaaaaacaacaaaagtgtattttacctcaaattcaccaatctgaactctaaattcatcccagcccctcccccaaggactccttcacaaactcaagacattgaatctccacatgatctgtgttcaagtcagaaatgtgggggttgtggccgggcgcagtggctcacacatgaaatcccagcactttgggaggccgaggcaggtggatcacttgaggccaggagttcgagaccagcctggccaacatggcaaaaccccgtctctaccaaaaataaaaaattagctgggcatggtggcacacatctgtaatcccagctactcgggaggctgaggcaggagaatcgcttgaacttgggaggtggaggttgctgtgagccgggatcatcgtaccactgcactccagcctgggtaacagagcaagactctgtctcaaaaaaaaaaaaaaaaaaaaaaaagtgggggttgtcccggacgcccttcctctcacaccctgagtgggtgcccaatgctgccacctgactggccccagcatcccgcctgcctgcgtgcctgctccagaagggtctcttctctgcagggccagtctttgaacgaggtgggtcaggtctctctctggtggttctgtctctgtcttgacacctcaccatggccctggctacctctccaacttcacctcctaccatgtttctctaacccgcctctcaatgctcctgcggcagggcctctacactccctgctcctgctgcctggtatgctctgaacagacacctacttgtctctttcacacccaaaagtcctcagattcccactaagatctcttttcggagaggccttcacttcccatcatgcaattcccctgtcactgcctccttaccctccttaattttcttcatagaatgtgggtattttcgtatttgctttcatctctccccggcacccacaacataagctccccaaggacaaaggctgtgtttctccctggcgtattcccagcagcaggaacagcacttggcacacagtaggtactgactgagcacacagctggggaaggaatgaaagcctaagcactgctcctacttcacacctgaaatgtcacttcctcagaagcctccctccccactccccaccatggaaatcgtctctcccttagcattatcatctgttaaagcacttactaaaatagacaattacacatgtgtttgcattgtaaaagttaacatctgcccagccttctggactagggtcagccacccacagcgtgagagccgtcccaagcaggtctttcgctggcagtgacgagacggctgccagtgctctgggttgccagcatatcctcttggccactccagcagctatgagaccctcggatggagtctcgtggactgactgagctcacctgggtcacacggccagtggtaaacagggctcggattggctgggtctggatcatgtgcccgcccaggaggaactgggtggttcacaaggaatgctgggtgctattacctggggaagggaaaagagatgttgggccaaccttgaaaagtttttatccaagtactctttccataatggaaaaaggaactggtgtataaaaattcaccagtacagccaactttttttcttttttttttttttggagacagggtctcgctgtgacacccaggctggggtgcggtggtgtgatcacagctcattgtagccttgaccccctggggctcaagtgatcctctcacctcaggctcctaagtagctgggactacaggtgcatgccaccatgcctggctagtttttgtatttttttgtagagatggagacttgctatgttgcccaggctggtcttgaactcctggcctcaagcaatcctcctggctcggtttcctaaagtgctgggattacaggcatgagccaccacacccagccctcattggtattttttaatagcacattaaaaacacacagctaataagcagagaaaatcacaagcctcttaaattctgtttgtatgcctttcctccttgctgtgtaaaatgtggtcactgttcttttatttcagtgccatatggacagttaagagctgcaaatgaaggtgatacggaatttaatttcacaaaagaaatgagagacaaaacaagaaacaatcagtagtttgctaaatgccctgtttattctgcaaacaaggcttagaaatgtatagacacaatttgtaggctgagaaatctctgtgtagttgtgacttccatacttccgcaaaagtagtaaggacagcgacttctgaacacattaacctaccactgttttgtttagagcgaacacagtgagaatggattcctaacggcctgtttctctaagtgatcgtcgcagttcgctgctctagtctttaagaacaagtggagccttcacttgagccgccacctccttgccattcagggcttcaacaattgcaagcgcaaactcgaagctggtcccaggcccccggcttgtaagaatcaggccgtctttttccacacgattctcagagtaggtgtaatgacctgcaaagtagaaacagaaaaggtgacatcctaatgggctatgtgacgagaaagacgattacttaccaattaaattcactattacagcatataaacccaacactgtagctaaccattcaaaaacatttactaggcactccaagctcttagaagccccctacaaaggtatttttaaaactgtgcagagcaaagggtgacagaaaccactgttagaatgaaacaaatatgcgtgagttaaatgcagctgctaagactttaagtgttgggggagatgtcggtgaatgacagttactcacatcactatttacaacaaagctcaagtgtcaattctgaagtgccggggaagggtgaagggatgcggcagcgctgaacgcagaagccaccccaatcaacatgtggcggcacgcacaccctctgatgcctcaaaaacaaccacagcacaacgtaatggaggcgggtatgcatgtgagtgtgcgtgtgcaggtagaaaccacattccctctcaaggactactttccttccgcatccccgcacctccaggcccgccggttggctatttcttggcaaatataataccaaaactgggactcttaagcatggatgccctgagctctgcccctccacagcaggtagtcaccagcctctccactgcacacagagcctaacctccctccccacacccatccctatcactctcccacctggagcttcccttactgtatacaacacgttctctcctgctccaggaagagctcaagggctgctccctccacccagagaccagctctttccagttccttgctccttcagtttcagcatcaacaaaaacccctcagagagggtatctgtgaccacccccacctccccaaattaggtacctctattgactctatcaccgcattctatttactgccctcgcagcattgatacaatctatcacaatctatgaacatttcatttccttgtttattgtttactctttaaaaaggctgggtcttcatcagtccctgtctggccaatgatatccatggcacacaggaggcacccctgaagtgtgaggtcaaaggcaccaaacaccattcttgactcgatctcctttctcgcctgtcccctgctttaaaggggaaggatctctgcatgattacagctctcccttccggctgtgcgccccttcgatccatgcccagcacccaaaagctaactgtccagagtgcaaagcagggcatagccagttccccatggaaagcccttgccaactctctccagcacctgaaggtcacgctgaactccatgtcacggggcctggagccctctgcggtctggccttcgcacagagactgggctgggaccagaaggagatggaaaggaacctgctctctgggtagaagctggtggtgcctgcactaggctggtgacagtgatccagaggaaatggaggtttgcaatgaaggcctaggtgaggaggcttcaaggatgactcccagctgcctgtcccaggtgactggatgatggtgacaccactcagtgatgtggggccacagaacagatttagcggagggggaagtgacaaagctcctctgtgaactcctgctctatcctgatgcaccggccacgcaggcaggcgggtggctctggtcaccaccgctcagtgcggacctgagaacaccctgagggcacagctttctcttcttccttcttctgttcccagtgccaggcactaaggaggagcttaggaaacgtctgttcaatgaacacgcagaaaaattcatctgaaaacctcccttcaaacagaagcagagtgcttctgctatattaatgagcttctgaaaccacacagtgttcatttcttttccaaggagattaacaatggctataggaacttgtcttactgtcattagaaaccaagccactgctggtcgaaggcagtgagttatctcaattgatcgttcacaggcagttacaccttgttctactctttctcctcttctcactactgtgcttgactaatctaaaaaatttaaaaaatcaggtcacccaccaaaataaatgaatagagtacataaacaatttccaatttaactattgtagagaaaaagaggatccctagtttgaggggaaaaggtttatcataatctggcctcatttactgatggttaaaccaggccaagaccatttcaaatgctaacctagaaactggctgggctaggtcttccagagcgacagtgagatgcacagctgagagtgggacaacgcgaggcacaactgtaaatggttcactgaacagtatctttgtggctaaaacatcgcaaacagggcttaaactggttaaatatgcttaaaggttctacggttcttgtcagacttttaaccacgagaagcaaaaggtttaaggttaccaactgcctccacctagtggcgaagacagaacatgcaccccatcagcaccaggaaggcactgtgcgaactggaggctgggattgtgaccctatagcgaattcagattttacacttcccgttcaaccagcagaaggcattgatttttatttctttattttttttaaaccagactccaagtcttaaagtctcttcagagaaaaagcaatgggaagccggatgcagtggctcatgccggtaattccaacactctgggacgccaaggcaggtggatcacctgaggtcaggatttcaagaccagcctgaccaacatggtgaaaccccgcctctactaaaaaaaaaaaaaaaaatacaaaaattagctgggcctggcggccagtacctgtaatcccagctattcaggaggctgagacaggagaatcacttgaacccgggaggcggaggttgcagtgagccgagatgcgtcactgcacttcagcctgggtgagagagcaagactccgtctcaaaaaaaaaaaaaaaaaaaaaaaaaaaaggcgggggggctgggcatagtggctcacgcctgtaatcccagcacatggggaagccgaggagggcagatcacaaggtcaggagatcgagaccatcctggctaacacgatgaaaccccgtctctactaaaaatacaaaaaataagccaggcgtggtggcgggcacctgtagtcccagctacttgggaggctgaggcaggagaatggcgtgaacctgggaggcggagcttgccgtgagcacagatcgtgccactgtactccagcctggatgacagagagagactctgtctcaaaaaaaaaaaaaaaacaaaagacacaggacacaggtcagcaacgacaagcctgagggccgaggccaggttgctgcctgtttttgcaaatgcagcttcactggcacaaagccaccctgcgtgtttagtactgtctgtagctattgtggaggtgcaacagttgagtagctgccagagatctgaagtcccagaaagcctgcaatatttaccacctggcctttggggagcagtcagttgacccctgagcagagttctgggttcaaatcccaggtctgccatttagtggctgtctgacctctcagagcttcactttctggtaaaatgagaatgacaccaacctagcaaacaaacagtactcagcagtggtggcatgcagtggcgttacagaagctaggtgagggaagtcttttcaccaacaatcctgaagcaggtttatcctcaggcaacggatgaggaaacaggctcagagacactaaggaaacttcccacagtgagtggggaagctgagggccaccccacgatgccaggctccagagaccctgctcttcagtgctcgggtatgggaccaggcatgcggatgccatcaaacagtggacaaatgagaaacggaatcacacattacagttataactgacttattctaaaatcggaggaattaaaagattatggggactggagctggtagcacacacctgtaattccagcactttgggagaccaaggtgggagggtcatttgagcccaggagtttaagtactgcttgggcaacatagtgagaccctgaatctatcaaaaaaaagataagaaaaaaagaaaaaagactatggtcttcagatgggattgcttatctgagaagaaactgtcacactgatctttcaagttcacagtgaggacaagggcctcacccagagcagacccccaggtgatgactgcagccctacctctcgaagtgtcctgaaggagtagacatttcaagtatccatttcttataatagaggttactgactaaatccaacacctggtaacttaaatgtgtgggagccttttgctaccacagagcaggggaggggcaggaagccaaaactggatgcaaggcagagggctgggcttgagctctggcctcagtctctccttgtttgtgaagccaggatgatgccacctgccttgctgggcactggggaccaggaagctccaccaagataacgtacgggaacgtgctttgtaaactccaagtgtgagcatcaacaatctgatctttttctatgcctgaccaacctcaatgtttttgaggcactaaaggaaaacagatgcaacaggcacaccttcaggtagtgcaggagcgcgctccgcttgtcttccctctgaagacatcacaaagggagcccagttctgttctttccatttctttcaacgctctaaaatccctccatgagcttaaagtaaattaaattcctacatttaaaatgcccagaaaccagagacttttattaaaaagtaccaatttttttttttttttttgagatggagtctcactctgttgcccaggctggagtgcagtggcacgatctcagctcactgcaagctccacctcttgggttcacgccactctcctgcctcagcctcctgagtagctgggactacaggtgcccgccaccacgcccagctaatttttttagtacatttagtagagacggggtttcaccgtgttagccaggatggtctcgatctcctgacctcgtgatctacctcccccaccggcctccccaagtgctgggattacaggcgtgagtcactgcatccagcaaaaagtaccaattttcaaacagatcgttttaatgataacatagtatctttctagcaactaaaataaaaccatgagcggggcacagtggctcacatctgtaatcctagtactttgggaggccaagccagaaggatcgcttgaggccaggagttcaagaccagactgtgcaatatggttagaccctgtctctacaaaaaaatttaaaaattagccaagtgtggtggctcatacccatagttccagctactcgggaggctgaggtgagaggattgcctgatcccaagaggtggaggttacaatgaactgagatcacaccactgcactcctgcctgggtgacagagcaagcctctgtctcaaatacattaaataaataaacaaaccatggattttcaggaaaacactgctctggatcaaatgtaactgtatgtagaatgtacaacagcaagagagaaccctcatgtaaactgtggactctggatgatgatgtgtcaatgtgggtacagattctggtgcaggatgttgatagtaggggaggctatgcatggccaggggcgggggcctggggagtggcgagtgggtcaaggtagacgggaatttggctgtgaacctaaaactgctctaaaaaactaaagtttagtaattaaaaaacatgcagtataatgaaaagtgcatcacttttaaagtggagctcagatatgctcacagcggcattcaaggatgatcattatggcatggtttacaagggcaaaagcagaaaaccaccttcatgcccacccccaggagaaggttacatacagcatggcacattccaacactggactagcagctgtacttaacaaggatgaagcaaatctaaatctacatgtgctgttaaaagataacataagatattaacattaagttaaaaaaagcaagctgcagaacaatacatttagtagatctcattttagttaaaataaaaaggataatgagtatgtgatagataaaattctacaggtacacaagaaacttttttttttttttttttttgatagggtcttgctttgtcctccaggctggagttcagtggcgagatcacagctcaccatagctttgacctcccaggcttaaagcgatcatcccacctcagcctcctgagcagctgcaactaccagtgtgcatcaccatgcctggctaatgttttttgtatttttagtagagatggagtttaaccatgttgcccaggctggtctcgaactcggggctcaagcgatccacccgcctcagcctcccaaagtactgggattacaggcggaagccactgtgcccagtctacaagaaacttgtggtggcacatgcctgtaatcccagctactcgggaggctgagacaggagagtcccttgaacccgggaggcggaggttgcagtgagctgagatcacaccactgcattccagcctgggcaacagagcgagagactccatctcaaaaaaaaaaaaaaaaccacacacaggcatatgggccaggcgcggtggctaacacctgtaatcccagcactctgggaggctgaggcaggcagatcacaaggtcaagagttcgagactgggcgcggtggctcatgcctgtaatcccagcactttcagaggctgaggcgggtggatcacaaggtcagaagttcaagaccagcatgaccaacatggagaaaccccatctctactaaaaaatacaaaaattagccaggcgtggtggagcacacctgtgatcccagctactcaggaggctgaggcagaagaatcacttgaacccgggaggcggaagttgcagtgagcagagaacgcaccatggcactccagcctgggcaacagagcgagactctgtctcaaaaaaaaaaaaaaaaaaaaaaaaaaaaagagtttgagaccagcctgaccaacatggtgaaactccatctctactaaaaatacaaaaattagctgggtgtgatggcatgcgcctgtaatcccagctactcaggaggctgagagagaagaatcgcttgaacccgggaggcagggattgcagtaagccaagatcacgccactgcactccagcctgggcgatggagcgagactccatctcaaaaaacaaacaaacaaacaaaaacaagcatatacttacctccattcatcattttgtctttagcaagagggtgtgttgtaactttacttccaaaacctatttcatgagccaacagagcagtaggacctaagaataaaaataaaaagatctaagtgcagatatagaaaagcccatgtttaaaaaatcgcaatagtgcctggcacagtggctcatgcctgtaatcccagcaattggggaggcctaggtagaaaaattgcttgagcccaggaattcaacatcagcctgggcaacacagaccccttctctaacaacaacaaaaactgcaacagcaaagtattcttcaaaatcaagaggctcttaccaaacatacagctacgattctgaaatgaaacacttcctagtatgagagataaagtatgtttataacaaacgatttgctgagcacatctggcaaaagcacagaaactcaaaatacttcaataaccatttactcaagaagatttaccttgataccagcagagcatacacagataaacaaaatgtgctcacctctctcaccttccccatccccagaacagggaccacatataccaggagtccaaaggagggggaggatcactggggcgggctcaacttcttacctcactcttagtaaaaggaaagatttagttacatgctaaaggcaactggtactctctgaacttctggattttattgctcttttgtaatcttattttctacttgaaaatgggaaattaggccgggcacggtggctcatgcctgtattcccagcactttgggaggccaaggcggctggatcatgaggtcaggagatcaagaccatcctggctaacacgctggaaccctgtctctactaaaaatacaaaaaattagctgtgcgtggtggcgggcgcctgtagtcccagctactcgggaggctgaggcaggagaatggggtgaacccgggaggcagagctttcagtgagccaagatcgtgccactgcactccagcctgggcgacagagcgagactctgtctcaaaataaataaaaaataaataaataaaatgggaaattaacactcgttcatccacctatccacccaagtatgccaggtggtaggattaaaatggacagcacactgtccttgaaggagatagcctgtgaagtgcctggaagtgtgagatataaaggcactagcatcacgtgatgaaagctacttaagcaaagaaccacatggaagtgtcagttgatgaagtctttccaaattggcaggtcctaacttgagatttttatttaaatgtattcactgaaaacggccaacttcagggagggtcacaagcatattgcgtatgtaatggtcctaaataaggattaaaaacaaagattttatatacctttcattgttatttcatcttaaagctttttacaaagtattcattctacctttttcctctaagccacacatataaacattctttctaaggcctcacatgacacttagaaggatacgtttcagaacagcaccttgatcttggaaacacttaaggtgccctggatggctaagatcctgtggcacagtttgtacacttttagtgtcagcaaacctgagaggtcttggtcttactgtcctttcatttttcaacaagactccaaggaaggaattatataatatacccacaagctactcagaccgtagctgttacaaacaggaagatcacacaaatactacctaattacataagctttctgcctaatatcagctgtcagtttcagaccaagtcctgatttatagctcttaaatcaaaagcctcaaatgtctcttctccacgttatttttacacacaagacagctatgtatggtagcaaattttagaagtccgtaagaattgaataattatcaatttttatttgaatggatttataaattgtttttaatttttatttggtaagaatttaagaagaaattcctacatcatcttgcattttaaagtaaactttaatagatgatagcacagtgaggaaagtgatcggtgaacgagaatttttaggctgctcccttcaaggtggtaataaaatcactgctacgatgtgaataaatttatgttacagttggattcaggaatttactgatgtctttcatacttatcaggtaagctcataatcactgctttctggggcgtcagaaccctatttggaatactggagaagagacgtttcactctcccaggacctgggattctgatggatgaaaacgctctgtactctgcactacagtgcagagggcgcagctgaccatgtccccttctgcagccaacagcaccaccctgtggtaacatgcaaaatgaccacctctgccaactccccagctcctccaggtggccaagaccttgcttccagaggcctcattcctagacctgggcatctcagctgacaactgtccactcctccaactccacacttcctccccctcccctactcaaagtaaatatcatttaattttcttctcaacatagactcccttccaatttgcgttcctcattcactcaatattaaggactaggctaatattctttgtgttcaaaatgtttccaatccctaactgcaacacttcagaataatcttggctgggtgcggtggctcacgcctgtaatcctagcactttgggaggccaaggtgggcggatcacgagatcaggagttcgagaccagcctggctaacatggtgaaaccccgtctctaccaaaaatacaaaaattagctgggcatggtggcaggtgcctgtaattctagctactcgggagcctgaggcaggagaatcgcttgaacctgggaggtggaggttgcagtgagccgaaattgcaccactgcactccagcttgggcaacaagagcaaagctcccatttcaacaaaaaaaaaaaaaaaaaagaatcttatttttctgtttgccaatttaaaagatccaaatctcttccatcactcctctgttccattcccataaccctcatctcaattagctcagctcatcatcacattttttcctatttctggtgtagtgcccacaacagtggtgcaggatattcaatggtataaacacactgctagtgtgttttctatttttactgttttttatataatttttttttttttgagatggagtctcactctgtcgcccaggctggagagcagtggcgcaatctcggctcactgcaagctctgccccccaggttcacaccattctcctgcctcagcctcccgagtagctgggactacaggcacccgccaccacgcctggctaattttttgtatttttaggagagacagggtttcaccgtgttagccaggatggtctcgatctcctgaccttgtgatccgcacgcctcggcctcccaaagtgctgggattacaggtgtgagccaccgcccttggcctatttttactttttttttttaagagaccaagtcttgctctgtcctttaggctcaagtgcagtggtgtgatcaccacatctcaatgtaacctcaaattcctgggctcaaagtgatcctcccacctcagcctcctgagtagctgggactacaagtgtgcaccaccacaccaggctgattttttaaaatatttttttgtagaggtcggtgggggggtctcactatgttgcccaggctggtcttgaactcctgggttcaagtgatcctcccacctcagtctcccaaagtgctaggattacagctatgagccaccacagccagcctgtttattttttaatgttgatttaaagtactataaggcccatgcttcttagcatggcattccatctagcctcagcacaaaacagtaagccaaatgtggttgattttttttttttttttttgaaacgaagtcttgctctgtcgctcaggctggagtgcagtggcacgatctcggctcactgcaatctccgcctcccgggttcaagcgattctcctgcctcagcctcccaagtagctaggacgacaggcatgcgccaccatgccctgctaatttttgttatttttatttttattattttattttatttattttttgagacggagtttcactcttgttgcccaggctggagtgcaatggcgcaatcttggctcactgcaacctccacttcccaggttcaagcgattctcctgcctcagcctcccaagcagctgggattacaggcacgcgccaccacgcctggctaatttctgtatttttagtagagatggggtttcaccatggtggccaggctggtttcgaactcctgaccttaagtgattttgctacttttgtggcacaggacaaactgacatgtggtttttactttcagcagaatcataaggaaacaaactcagcccaaactctttcttcctttggtcaaagaatctaggactgaggcttgcttcacagcagcagagccaaagaaaaccaaactcaaggatctgtgactttctctccaaagaggggagcagctgcttgggctgcagtgactgcagtgccctttggcagagataattacctgagcctcagggcaggtcaaaaggctagtggtgactcttgtagtaagcccacgtacaagacctgccagggtggtcaacctctgtggttcttcccagcccctaatgccacggttctcaaacatttaggtcttagaatccctttagcttttatgtgggttatatctatgaacatctgccatattaaaaattattacttttttttgagacagtcttgctgtgtcacccaggctggagtgcagtggcgtaatcgcggctcactgcaacctccgccgcccgggttcaatagattctcctgcctcagcctcctgatagctgggattacaggaatgcatcaccatacccagctaactgcccagctaacttttgtatttttagtagagacggggtttcaccatgttagccaggctggtttcgaactcctgacctcaagtgatcctcccacctcagcctcccgagtagctgggattacaggcgtgcaccaccatgcccagctaacttttgtatttttagtagaaacgggatttcaccacgtttgccaggctggttttgaactcctgacctcaaacgatctgcccacctcagcttcccaaagtgctgagattacaggcatgcgccactgtgccacgccaattacttttaatggcaaaaaccacaattacttttacatcaacctaataaaactgggaaatttttaaaacacaataataaattctcagatgatggtatcatcctactctgatgtcactcctgaaagactgagaagaaaaaaggcgaataacattttgtttgaaagacatggtgtcactctgctgcccaggctggagtgcaatcatagctcactgcagcctctaactcttgccttcaagcgatcctcccatctcagcctcctgagtagctgggactacatgcatgcagtactgtgcttggctaattttttgtttgtttgtttgttgagatgggggtctggctatgttgccaaggttagtctcaaactcctggctttcaagagatccttctgccttggcctcccaaaatgctgagattacaggcatgagccaccacacctggcccctcagtagcatctgctttgaccttgcaagtgcaccaaaagaacattgagaaccactgatactcgaatgtatcaagtccccaggacctctggcccataacttcttttgaaaagcctactgtattgaacaaaatagcaacagcaacatgttttgatgttgatgtttaccaaaccatccactcattcattcgtttattcattcactcttctgacaaatatttattttattttattttattttttttttgagacgaagtctcgctcgtgtcccccaggctggagtgcaacggcacaatctcggctcactgcaacctccgcctcccgggttcaagcgattctcctgcctcagcctcccgagtagctgggattacaggcgcccgccaccacgcctggctaatttctgtatttttagtagagatggggtttcaccatggtggccaggctggtcttgaactcctgacctcaggtgatctgcccgcctcagcctcccaaagtgctgggattacaggcgtgagccactgcgcccggccctgacaaatatttaatgaagacctatacaacaaggaaggtgctggcaaaaattacagcatgggaaaaaaccaaaatggcagaacatcatctgataggaaagcaacaagaatggatcttaaaatggttatgagaaaataaaatattactaaggtacaaagagaagaggacatctgcgaagcaccaaatgtccttgttctaaatta

SEQ ID NO: 2050 - protein, 450 aa, Homo sapiens
MTHCLTQGCSWSAAAGSQLTATSASWVQAILLLPQPPSWSGTCLGTCKLQEVKKMMMVVIMMVTVVVVVVMLMVMVVVRVMVMVVVMVMMVVVRVMVLVVVMVVVRVMVKVMLVVMVVVVKVMVVVMVMVVVRVMLVVMVMVVVSVVMVVVRVMVRVMLVVMVVVVVKVMVVVMVMVVRVMLVVMMVVMVVVVSVVIVVRVMVRVVRVMVMTVVVMVMMVMVMVMMVIVMVVVVTTVGMLMMMEMVIVIVVVVMFAALVFKNKWSLHLSRHLLAIQGFNNCKRKLEAGPRPPASPEGHAELHVTGPGALCGLAFAQRLGWDQKEMERNLLSGLEFSGEITAHHSFDLPGLKRSSHLSLLSSCNYQLECNGTISAHCNLRLPGSSDSPASASRVAGITGARHHAWLISVFLVEMGFHHGGQAGLELLTSGDLPASASQSAGITGVSHCARP

SEQ ID NO: 2051 - DNA, 37904 bp, Homo sapiens
  source (1)..(37904)
  CDS (201)..(258)
  CDS (10133)..(10331)
  CDS (22722)..(23754)
  CDS (25833)..(26006)
  CDS (28729)..(28809)
  CDS (30042)..(30239)
  CDS (31406)..(31526)
  CDS (31577)..(32016)
  CDS (32051)..(32196)
  CDS (32354)..(32567)
  CDS (37552)..(37704)
  modified_base (4684)..(4783): a, t, c, g, unknown or other
  modified_base (15881)..(15980): a, t, c, g, unknown or other
  modified_base (23553)..(23652): a, t, c, g, unknown or other
  modified_base (37717)..(37816): a, t, c, g, unknown or other
tccaataaatatttactagttgaacaaatcaggtaagaatggagaggactcacaacagctgatggagcccagcctccccaggcccttccttcagggattctaaatgtccatgtccctaacttcagggttggaccctttctccttactcacccctgtcaacctttccctggcctgatgcacagatgtgggttctgttagaaatgatctccatttcagatgaggaaacgggctcagctgtgttgagtgacctactgttaggtttggtgcaaaagagattgcgttttttgccattgaaagtaatggcaagccgggtgtgggggctcacgcctgtaatcccagcactttgggaggccaaggcgggtggatcacctgaggtcagttgttcgagactagcctggccaacgtggtgaaaccccgtctctactaaaaatataaaaattagctgggcgtggtggtgggtgcctgtaatcccagctgctcaggaggctgaggcaggagaattgcctgaacccaggagacggaggttgcagtgagccaacatggtgccactgcactccagcctgggcgacagagtgagactccattaaaaaaaaaaaaaaaaagaatggcaaaaaccacaattacttttgcaccaaacctaatagctttgtggcccgtgggtatggctggcttctgaggttgcagttcttgtacctgctggcttgggaaaaggagggcgctgagccctaagagatgcattactaagacataatgcatttctgcaaagcatcattctaccctgaatttggtgggcgtgaactaaggaggaggctctatttcagagtagaatgctggatgatgtgttggatgatgctggatcagccattgtgagtcctcttcattcttatcttttttttttttttttaataagacagggtcatgctctgttgctcaggctggagtgcagtggcccaacaatagctcactgcagcctcgacctcctgggctcaagggatcctcccacctcagcatcctgagtagctaggactacagacatgcaccaccacacctggctaactttttttttctttctttttagagacagggtctcactttgtcacccagactggaggggagtgatgcgatcacagctcactgcaaccttgacctcccaggttcaagtggtcttcccacctcagcctccggagtagctgggactacaggcatacaccactatgtctggctactttttttattttttgtagagacaggggtcttactatgttgcccaggctggtctcaaactcctgggctgaagcaatgctgcatcagcttcctaaaacattgggattacaggcatgagccatcatgcctggctatacgtattcttttaggataaaaaagagttccaggagactccctttttgcaggagactccctggaggtggaatctgctgttgggattctcagctgggagaggggtggaggctgcactctgctgggctgctggttgtttttttgttttgttttgttttgtttgagatggagttttgctcttgttacccaggctggagtgcagtggcgcaatctcggctcactgcaacctccgtctcccgggttcaagtgattctcttgcctcagcctcccaagtagctgggactacaggtgcccaccaccaagcccagctaacttttgtgtttttagtagagaccaggtttcaccgtgttggtcaggctggtcacgatctcctgacctcgggtgatccacctgcctcggcctcccaaagtgctggaattacaggtgagagccaccactccagccctgggctgcatttcttggcccagtcttggcccagtgggatggtcttcctgttaaagccacggagggcatcttccctgtgaagggagagcttgatggctcccaggatgtcagttaccccattggatccactcccaccccctgggaggtgagaagggtaggagttatattgcccagtttacagatgagaaaactgaagccctggaacatcaagtgtgatttgcccaaggcctcagtatcacaactcgcagagtccgacagcatgttatagacccacaccagagtgtggcacggaacaggaagagccagagttcctgaaagtcaggaggtttgtgtaacgcctctgctgtagacaagggctgaccgctctcaaagtccggggcagcttcaagggagcattttgagggaggcctgtggcctaacaaactgtgcacttacatcagaggtttccagggccccctccccccactatgtgggggccacatagaccttgggttaattgcaggatcctgtgagctttggtgtctctgtgtctgggatccccacccccaggggtgctgtgaaggcaggtaggcttccctgcttgatagggtagcaaaggcctgtgggtaggacttctgcattttctcttattagcaaggaagaaaggcttctggaaagaatgaaagaaatcttcacgaaaggaagccgggaatgagaaagctgcagcagaggcggatctccaacagaacacaagtttccataagcggggggtggaagaaagaattggactcagaggagaccaaagaatggcatttgttgggtgcttcttctgtaccaggcattatgctttgcatcctttagtgtcacagtgactctgaggttttattcttttcctttttatagatgaggaaacgggcttagggagatttaaacacttgccagaggtcacacggctagtaaatgatggagtggggatttgaacagaacacatctcagccatcatcggtggcatgagcggatccattgggagagtttccagttccagtagtgcagggagtcaggccacagcggtgatgctttgggggcccagcggccatctgtggaccaggagagctagtggggaaacctggggtggtggcagacaggctctagagcctgcagatctgtgttcctgcctctaccgcttcctgactgtgtaacctgggatctgttacttcacctccctgggcctcagtatccatgtatgtaaaatgacacttctccaagggttgagaggagtacatgatatggacatcaagcagcgtgtacagggcgggctcagtgcaagtccccagagggtgggcagcgtcagtttcagtccttgccctcttccttgggcttgtgtaatttgataattgaagtttgtctgtgtcaccatagacttggcacagctcgtggccagggcaggggctgttcctctttgcacccagggtcagtgcccatgaatgcttcatgggcaaagaagaacaagagtggggcaggggggtcaggcagctgctgggctgcttggggatgagtggggtgaaataccacctggcctcaaagtgacctgcacattaggacaactgtgatcctttctccttcagtacatgagtcctctgtatgagcaacacaggcccagagtctgcactacagggaacaatcatcgtagctaacacttctatggctatgaaccaggcagtgttctgaacatttgacacatattccctacttaagcttcacaacattcgcttgaaatgggtactgttatcatcatccccattttacagttggctaataaatgacagagccgggatttgaaattaaagaacagagaggttaagtgacttactgaaggtcacacagctaataagtattaaaggtaggattcaaacccagatagtttggctcctaggccatacttttaacctctgtggtgtacagcttcttggggaacaagcagcaagaatctgatcttggtatgaaaccaaggatttaacaattatcctaataatggcacatgtgggcacagcactacacagtttaaaaagcacatacagccaggtgggattacaggatcacacttttaatcccagcactttgggaggctgaggcgtgcggatcacttgaggttgggaattcaagaccagcctggccaacacggcgaaaccccatctctacaaaaaaatacataacctagctgagcgtagtggtgcatgcctatagtcccagctactcaggaggctgaggtaggaggatctcttgaggctcagaggttggggctgcagtgagccatgatcatgccactgcactccagcctgagcaacagagtgaaaccctgtgtcagaaaaattaaaataggccaggtgcagtggctcacacctataatccctgcactttggaaggctgagatgggcaaattgctggagctcaagagtttgagaccaacctgagcaacatggtgaaaccccatctccaccaaaaatacaaaaaattagccaggtgtagcggtgtgcacctgtggtcctagctcctcaggaggctgagacaggaggatcacttgagcccaggaggcagaggttgcagtgagccaagatcacgccactgcattccagcttgggcaaaacagtgagaccctgtctcaaaaaactaaatacataaaataaataaaaatttaaaaaataaaataaaaataaaaaccacatactactatataacttgctttcatggttgtgatttactcagttctctaacttctctatgaagaagatagggctttattggcttcttttttaaaatgtttatttctcatttaaaccagagagtttatttatttttattttatttatttatttatttttgagatggagttttgcttttgttgccnnnnnnnnnnnnnnnnnnnnnnnnnnnnnnnnnnnnnnnnnnnnnnnnnnnnnnnnnnnnnnnnnnnnnnnnnnnnnnnnnnnnnnnnnnnnnnnnnnnnttagcgggcagatcacgaggtcagcagtttgagaccagtctggccaacatagtgaaaccccatctctactaaaaatacaaaaattatctgggcatggtggggcgtgcccgtagttgtggctactcaggaggctaaagcaggagaacggcttgaacccagaaggcagaagttgtggtaagccgagattgtgacactgcactccagcctaggcaacagagccagactccgtctcaaaaaacaaacaaacaaacaaacaaaaaattagctgggtgtggtggcaggcacctgtaatcccagctactcgggaggctggggcaggagaattgtgtgaacccgggagacagaggttgcagtgagccgagatcgagccattgtattccagcccgggcgagactccatctcaaacaaaaaaaaaattgcttgtccaatccgtgataatttattgaacagttacatgcaaagtcattcattcacattacctcattgaatcctcccacaaatccaggaagtagatattattgttcccattttacagttgaggaaaccgaggcattaggaggtggctttcccagatcctacaacttgtgagagctgagactcacttccaggcctgcccgagtgcagagcctgagctgataattaccgggctctccagcagcctcagtcccatcctgggtagatgttacctcctgcttgttttcattctggccttccccccatcacttccatccctctagccactcctgaaattccgaacactgccttaattattctctctacctaagtgcccgcttcattaaggtgctttctgccatgagtttttggcttaattatgtggtgttcttcattgtacttagttggggaatctgattaatcaccattttatttatccaaatgttcatttatctgcagccggcgtctcctgggagagccttgtttttgctgagcttgcccttcctggattgtcttccccttcacccctgtcttaagtgctcctctttggagggcaccttctttccaggccttggctgcccactccagagcttgccggggtcccggcatctgggagatgggactggggatgcctcagtagtttagacgtgggaacatgggcagaagtagagtaggaattgacaagaagatgggagtcctgggagagtgggacctcaggcatggaggattctgggccctgtctcagcttgccaagaaaggcctcagcatctcctcctggtctcccacttccagtccatcctcctcctgtagccagacagcactgcacccaaagcacccagcttccatgtctctatgctcagaccttccctgcctcctagggaccagcagaataaagccctgggtccaaggtccagccacatctcttccccaccctgccacccctcatttcattcatccagagccaccccaggcctccaagctgtccataccctctccatatcatgtgaccagcttgtcccagtttgcccaggacttttggaacttgtccctgaaagtgctgtgctctaagaaaccccatggtctcaggcacactgggacagttggtcatcctcagctcagggtcacccacagtctcaggcagactcatgggggtgtgctcatttgtcgccatcagttttgtctttgaatgtgtttgttcacttataaaaatattactcataggccgagcgcagtggctcacgcctgtaatcccagcattttggaaggccgaggcgggctaatcacttgaggtcaggagttcaagactagcctggccaacatagtgaaaccccatctctactaaaaatacagaaattggccaggcgtggtggtgggtgcctgtaatcccagctactcagcaggctgaggcaagattattgcttgaacctgggaagcagaggttgcagtgagccaagatggtgccactgcactccagcctgggtgacagcccaagactccgtctcaaaaaaaaaaaaaattactcctggatgtaaaaaccttgcagaaatatatctggctgaatctcaaaggcccccataatcccattccctagagttaacaaattaacagtttgatgattctttgttttgttgttatgcgtgaaaacagcgttgtcctactcaagtggctctgcagcgccgtttcaaacgtggtagcttggccctcttcccacactccatcataatggctgcattgtgttgaatcgtgtggaggcactgtcattgactgtgaccccttctgagggacatccacagtgttttcattattttttatttattttattttattttttatttttttgagatggaatctcgctctgtcacctaggccagagtgcagtggcgcaatctcggcttactgcaacctctgcctcccgggtgcaagtgattctcctgcctcagcctcccgagtagctgggattacagccaccatgcctgtctaatttttgtattttttgtagagatgggtttcaccatgttggccaggctggtctcgaactcctgacctcaggagtccgcccaccttggcttcccaaagtgctgggattacccgcgtgagccactgcccctggccttttttttttttttttaagacggaatctcgctctgtcaccaggctagagtgcagtggtgtgatctcagctcactgcaacctccacctcctgggttcaaatgattctcttgcctcagcctcccgagtagctgggactacaggcgcacaccaccacgcccagctaatttttatatttttagtagagacaggatttcaccatgttggccaggatggtctcaatctcttgacctcgtgatccgcccaccttggcctcccaaagtgctgggattacaggggtgagccactgtgcacagcctgatttttttttttttttttttatacagagtctcctctgtcgcccaggctggagtgcggtggcacaatctcagctcactgcaagctccacctcctgggttcacaccattctcctgcctcagcctcctgagtagctgggactacaggtgcccaccaccacacccggctagttttttgtgtttttagtagagatggggtttcaccgtgttagccaggatggtctcgatctcctgacctcgtgatccgcccacctcggcctcccaaagtgctgggaatacagagatgaatgaaccaccctgcctggtccccggcctgatttttttttagacttccccttggtagcaccctgggccgtttggcccaggatttatgcaaattaatgtagatatatgctaattagatcactgccaggcactttgttctaatggagttgccagctcagaggtgcagtgggttggatctgcccagaaggggcttgcagagccccccagctggggaaggggtggggatgggtcagtggtcactgagatgaggggatggggttaccatggagacagaggccaggagcctgctgctgcctcctgacaagaccagggctggcccaatcagtcgcatcctgggcctccctagcagctccaagctggtctctgagggctaatgatgcagaaggtgagcagatgctccctggctccccaggcccagcggaggtagagggctgggccgcagcaggagggcgtgcagacaggcagatggcagtcaggggattgggggtccaggacctgtcccgaggaggaggaagattacccctccagggtggaaggcacctccagcagtgccataaggggtgagactcccaaatgctggggcatgcaaacaggctgggcggccaaatctcaaagagcaccttggtaagaagtggtggaaaagagcaagggtttggccccagactggttggagtcagccgttctgcgtccccttaggcaagcctgccactgctctgggcctcagtttcctcatttataaaaaggggtaggattggccgggcgcggtggctcacgcctgtaatccctgcactttgggaggcccaggagggaggatcacgaggtcaggagatcgagaccttcctggctaacacggtgaaaccctgtctctattaaaaatacaaaaaaaaattagccgggcatggtggcgggcacctgtagtcccagctacttgggaggctgaggcaggaggatggcgtgaacccggaaagcagagcttgcagtgagctgagatagtgccactgcactccagcctcggcgacagagagagactccgtctcaaaaaaaaaaaaaaaatagggtaggattaaaaggtgtgacatgagcatgaggtttatagacaatgagtgctccataaagtatcctaaggtagaccccttgagagaggttactgatcttctgggagatttggtttgttttgtttcctaatgggacagatgttactggtgtctgctctgaggagggaaagggcaagactgtcatccccaagaggacaggagctgggtgcactgtattcaccactgtgttctcgggatttagcacacaagaggcactcgaactcctgacctcgtgatccacccgccttcgcctcccaaattgctgggagcgtgagcctgaccaagatggcaaaaccctgtctctactaaaaatacaaaaattagccaggcatggtggcagtcacctgtaatcccagctactcaggaggctgaggcagagaattgcttgaaccagggaggcggaggttgcagtgagctgagatcgcaccactgcgctccagcctgggcgacagagcgagactgtcaaaaaaaaaaaggcactcgagaaatgtttataagacgaatacatgttatgtactcagaatactgtctagatcaaataggagataaataaatgtggccgggcacagtggctcacacctgtaatcccaacaccttgagaggccaaggcaggggaggatcacttgagctcaggagttcgagaccagcctgggaaatatagtgagacccttgtctctacaaaaaagtttaaaaaatagccaagtgtgggtggcagctgcctgtagtcccaactactcaggaggctgaggtgggaagatcacttgatcccaggaggctgaggctgcagtgagcccggatcatgccactgcactccagcatgaacaacagcaagaccctgtctcaaaaaaaaaaaaaaaaaaagagagaggagacttctggtccaactttgttgtaagacattccggaactatagaagtgcatatagttaagattcaaagtctccccatctccccactccctagaaataacatctcataactgtttattgttatgagataactccctggcttttggtcctgtgtttacagtcgcacgcgtttggtgccttttaggggaggtgtttacacgaacggaatcatgttgctctgcagcttgcttttttcacctaacagtgatggccgtggccatttcccagtgggatccgggctgggatagagaggcagcaaggctgcaaaagccctggaagaaagacaggagagaggggtgtgcgtgcgtgcgtgtgtgtgaatgcgtgtgcgcgcatgtgttcgtgcgtgcgcgtgcgtgtgtgcacgtgtgcatgtgtgtgtgtgtgcgtgtgtgtgtgcatgtgtgtgcgtgtgtgtgtgttcggggaccagggaggcatcttcacaggtccctaggcacagtggaggggaacctggcagagaagcccccatcatcagctcatcagctcccagaggacagtggtctctgtctccagacgagctctctgaggcaggatacacgccatgttgttcactgccatatgtccagggcccggcacattgtaggtgctcaagaaatatttgctcaatgaattgagtccttactgggcccatcttctttggcagggtcaaagaccacttggtctctgtgactgttccttttaatcttatgttgagttaaatctcatttcaactcatgctcagatggcaatgaccccagatggacccccggagatggggagagggaggagcacctcccctcaggcacatcactgccccctctgctgtcagtttgctcacctccctaatgagggggttgggccagcagatctcaggggtccttccagctctgttgtctgcggctttcatcccactccctcatttcacagatgaggggttgagtcgagtttaattttgtcagctgcctcagaaatccattgggaaaaggggggtctgaggttggggatgcaacaaaagctgttgccatatagtcagcaccaactgcgtgccagacatccggctggctgcgagctttatgggcactgtctgaatcctcaggacatttcactaatgagaaaactgaggctcagagagggggataacttgccgaaggtcacacagtgagtcgatgagaactggggctggaactcaggcctccctgtccttaaatggagagctcgtccctcagtggactgaagtcagtgagagagacagaaccaggctggaccaaagctttctccagaaacttcaagggtccatccctcatctttccccagacaggctgacttctgtgtctaaggcctatggtgacatggctggaattttggccaggaaagtagttgacttgccaaattggctggcaagggtggggcacgagagacttctgatgggttcaatggccctgagcctgggccctacgctaccttctctcccagccagcttcctggagctagggtgggcccatctgcattattcagcccttgtccctcactccccaccttgtgtgggctcctggggttggcgtctagacagacaagagcatcctactgagaacagaggcagccctgactcggggctgaaggttcctatggcaacggcatcccccttcagctggcagctacctgataaataaataattaggggtgggggcggggagcgaagggcagggggaagggcagcagggagcctcagggaggccccactctggagagcagaagggccagttaggtttgaagtagggtggagggcaggggggttggcattgctaggtgaaagaaagtggacggaaaaaagtggccagatatgagagatttggaagatcccagagagccagggcttgaggatgggctgcggcgagtgggggacgtggaacaagtggggagcatgagggagactgaaacctaaagtttaggttcctagctcaagcggctggacacatcgtggggcccaaaacactggacatggaccaggtttgggcatatggagttcacaatgagctgttcactgagtcattggttagaatgcagctgggggctgcacgtgagcaggtagtcactgaagcttgggtgggcatgcgtttcctgggataagtgtggcatgaagagggcctgggatgtagctttggggcactctaatagttaggggcctgctgctctagaatggggtagtagccaaggaaggtggagaatttggttttagcacctggagtgtgccaagcactggtctcaccactgaaaatacggcagtgaaccacacaagcagaaattcctgccctcacaaagcttgccatccactgcaggagacagaccataactaaatagtgtgtaaaagagtgtgtttgccaatgataagcacaggccagcgtggtggcacatgcctgtagtcctagctactcaggaggctgaggtgggaggattgagccaaggagttcaaggctgcagtgagccgcgatcacaccactgcactccagctgggtgacaaagcgaaaatcccatctcaaaaaaataaaaataaaaagtaaaaaaccaccaggtgcagtggctcatgcctgtaatcccaacactttgggaggccacggtgggcagatcacttgaggtcaggagtttgagaccagcctggccaacatggtgaaaccccatctctactaaaaatataaaaattagctgggcttggtggcaggtgcctgtaatcccagctactccagaggctgaggcaggagaatcgcttgaacccgggagatagaggttgcagcaagccgagatcgcgccactgcactccaacctgggcgacgaagctggactccatctcagggaaaaaaaaaaaaaaaggccgggcacggtggctcatgcctgtaatcccagcactttgggaggccaaggcgggcaaatcacaaggtcaggagtttgagaccaacctgaccaacatggtgaaaccccatctctactaaaaatacaaaaaattaggccagacgtggtagctcacgcctgtaatcccagcacttttggaggctgaggcgggcggatcacgaggtcagaagatcgagaccatcctggctaacacgatgaaaccccgtctctactaaaaatacaaaaaattagccgggcgtgctggtgggtgcctgtagtcccagctacttgggaggctgaggcaggagaatggtgtgaacctggaagacagagcttgcagtgagccgagatcacgccactgcactccagcctgggagacagagtgagactccgtctcaaaaaaataaaaaaataaaaaaataaataataaaataaaattgagattgtttataagacactgaatctgatttttttttttttaatagagatgggatctcactatgttgccaaggctagtcccaaactcctggcctcaagccatcctctggccttggcctcccaaagtgttgggattacaggcatgagtgactatacccaggctacatctaaattttttaaaagatatatttaggccaggcatggtggctcacgcctgtaatcccagcactttgggaggccaaggtgggtggaccacatgagcccaggagggtatgagactaggctgggcaacagggcgagaccctgttctctacaaaaaatacaaaaatccactgggcatggtgggatgcgcctgtagtcccagctactcgggaggctgaggcaggagaatggcgtgaaccccggaagtggagcttgcaatgagctgatatcacgccactgcactccagcctgggcgacagagcgagactccatctcaaaaaaaaaaaaattcatttaaatctgcactcaccatcggaggaagagacggccttttccaggcctgggtcatagccctgaataccccggtttgtactgatttccttcccctcctctactaagtgggtcctgagttcccaaagggcagggaccccaacttcttcacttctgcatcccggagctagcacaaagcctgacatagactaaacgttctgtgaataaataagtgatgaaccctggctgggtgagggcatgtcagatgtgggatggatggataaatgggtctagctggttatagataaatgagtgaatgattgttgggtgtgaggatgaaggaaggccagagccatgctgagaatgggaagaacagcccccactccatgtcaagtggagagagcagcacctgtgggccagtcagggaggccttcctaccaaaagagggaactgagctacactgtgaaaactaaggaggacttggataaagccaaagggaggcccagcgcagtggcttatgtctgtaatcccagcattttgggaggccaaggcaggaagattaattgaggccaggagttcaagactactcagggcaacatagtgagacccaatctctacaaaatattttaaaattacccagatgtgatggcacatgcctgtagtcccagctactaaggaggtgaggcaggaggatgccttgagcccaggaatttgaggttacagtgagctgtgatcaccacattgcaccccaacctgggcaaaagtgcaagactctttctcaaaataaaatataaaataaaaaataaggcaaaggcaaatgaaggtaggactttaactgctgttacagcctcttgggggcaggagctgatgggaaatacaggattgagccagatcctagtgggccctcggtgccaaactaagaagcttagactgttaagccttctattaattagccactatgtatcaagtctaattgtctgttagtttatgtgatatctctatatccccacaacaacttctcaagagagggattatcttctctatttatagttgaagaaatagattcagagagggaaagtgacttgccctaagtcacacagcagagctggaatttgaatctgagtttaaatgactacaaatctgctactgctttaaaaaaaaaaaaaaaaaaaaacctctctctgttttctatcaataaggtcacagagaacagagggggtttgagtgggtaccactttggctggagatgatatcacctcttaggtggattttttttttttttttgagacagagtcttgctctgtcacctaggctggagtacagtggcgcgatcttggctcactgcagcctctgcctcccaggctcaagcaattctcctccctcagcctcccaatctgctgggaatacaggcatgtgccaccacacccagctaactttcgtattttcagtagagatggagtttcaccatgttggccaggctggtcttgagctcctgacctcaagtggtccgccgaccttggcctcccaaagtgctgggattacaggcgtgagccactgcgcccagccttaggtggaaatatttggcagggtgcctcctcagctgcaccatgagcctggattgctctgtcacagcctcctccgtcctctgatggagaccttctcccttagggccaggtaacagctgagtcaagaacatcaagctggaccccagaacaccaaggctcccaaggccaggcagagtcagggtggaaggaggaagagtggagtggaggaagtgtgggataggagcagcagacagagaccgtggcagaggcccctggacaagcctggggagtttctcccccaaggccagcagctgatggaagtcaaggctggaagggcccttggagattacctagtccagtgacttccatgcatggaagaggagccccaaacccagcggggaaagtgggctgcccaaagtcacccaggagtcagaggcagacttcccaccacaatttacacctcttgactcccttaccagtgccaagatgggaaaaggtggtgccaagatgggacaggtggctgagaaaggcctattctgccaccaacctgctgtgtgaccttggacaagtcacttcccctctctgagctcatgttctcttcctcaaaagaaaaannnnnnnnnnnnnnnnnnnnnnnnnnnnnnnnnnnnnnnnnnnnnnnnnnnnnnnnnnnnnnnnnnnnnnnnnnnnnnnnnnnnnnnnnnnnnnnnnnnntctgaaatttttcattactgcctaatcccgagcaaagttaattatttcttccactattctgtttatgtacctcatagacgctattgccaatctatgtattgcttataactctctttatatgttttgcctctccaacaggcctaagagtcacaaacttagatgccagtagaggccagagaggaaaaacaactggtgaagctgctgagtttaagacagtgatcagtggacaatgccacactgttggccactgtattaacctcaggtctttatcccagggctttcttgggcacacctgtgccattcatgtttgcttccaaagctcctaacacaatacctggcagagtaaccaaaccgaagtgacccagaagtgttgagatccaactctgcccctaaggtgctatgtaactgtaaagaactcagtcagcgtctctgcccttcaggttctccctttctttctctctcccctcttcaaaaaaaggcaccttgaagatcatctaggccaatgggttttctactttgttcgttagaggccttggactgaggagctgattttggaggccttcacagaaggcaagggcacattgagagagcaggttgctagtcctctttccctatacaatcagacaagttctacttttttctgttttagaaatgtatgctttcttttgaagaaaagggtctactgttagaaaagtttgaaaacataacaaatggtacaggcaaagttgttctgcctgggatcaaatcctattctatgacttccttgttatatgaccctgggcaagtgatctaacctcagtttccttatctagaaaatggagatgatgataatagcacctacctcaaaggattgtagtgaggtttaatgagtaaatacatagaaattgtgcctggcacatcgtttttgtttttttgggtttttttttaggcagggtcttgctctgtcagccaggctggagtataatggcacaatcatgactcactgcagcctcaaatccctgggctcaagtgatcctcacgccttagcctcccaagtagctgtaagtacaggcttgcaccaccacacctgactagttttttaacaatatttttgtagagacagggtctcgctacattgcccaggctgatctcgaactcctcagctcaagcaatcctcccacctcagcctcccaaagtgctgagattacaggcatgagccaccacacccagcctggcacatagttcttgataagtgttggctacagtggtataatacaaaaacatatttggtctttgtccctggatcttgggaatttcctgagcaataggagtgttttttcttattcataagccccttctatcacacttgagtttaccctaatgaggtgacttaagtagagcccctagatctagggatgggactagtcaccagaaagaccaagtgatgagaaggttggaaatttcagtcccacccactgacctctgagaatggggggtggtgctgaagattgagctatatgaaaactcttgaacaatgagattcagagagctgggttggtgaatgcatccacaggccaggagggtgatgctccctgactcttcagggacagaaactcctgcacttgggactcttctggacctcaccctgtatacttcttcatctggctcctcattagtatcctttaaaataaacagacaaacgtaagtaaaatgccttcctggatcctgtgagccattctagcaaactattagaactgaggaggggatagcaggaacccccaatttatagccagtttatcagcagtatagctgggtggccagagacttgtgactggtctgaagtaggggcagtcttgaagaactgagtccttaacctgtggggtctacactaacccctaatagctagggtcagaattgaactggattgctggccacccagttggtgtgaagaatttggctgatgtcagaaaatatcccagaggctgtaattagtgagcatgttcagtcctctaacttgaaagcagggaaattattatgtttaacaactcagctatcttataagtgaactttctcagaagcctttagtgttttaacccacagagagactaatggtggaagactgaaacactgacaagccttggttcagggcaggggagaaagttcttaaccctctagaaatctcatcacctcagcagaacccaccatgcttctctccgggctgaccatgcctctgtcttctcgctcaggaagtgtggatatattctgaatcatctctctcctttatttccaaaccctgcttcattctccccacagcatttctttggcccaagggttagtcatccttcaaggtgaatattgatgtcatccccagctcctagcccctccaacttcttgccaaagatgtttctatctgttcctacagttaggctgtcttcctccgtagaaccctgacttccaggtggtaaagagggcacaagatatgctgggcactgaagcaggaacgacaggagtgctgggtgtgcaatcattcatttgctacacatttgctgattcctgccctgatcctagccctgtaggatgtagagataatttatgacgtagttgcttaagagtggaagtatgagagggcatcctgtgtgcgtgaattcgtcagggcagcacttgcgggaatgagccaggggcagaggttaattctactgaggtcagacaggccatccccactcccacaggacagacttatgagtgagtcagccaggccttggaatagaggttacaggcatgaccagatatagtcaagagccggcaggggtggtcagagccccagtgggaatccactgttactataggaattaaatgagataatgcatgtagaagcttggctcagagtaaacactcaataaatggtagctattattgtctttttgttattgagttgcattgttagcctcacagaggtaactggcagagattatatctggaagaggcccagcagaggatctggtagagaacgttacatctgggctgagcctttgtggaggtggttctattcttttgtgggaaatggactctttggagaacctgacgaaagctgtgcctctccccagaaaaaggcacagctgctcacatgatgctttgcatattatttcagggacttcacagactcctggaagcctgtctagtcacggaacctggttggacacagctgttatttgccaagcatggctgagaaaatttcctgctgttctgccaggcactgtggctcacacctataatcccagcacttttggaggccgaggcaggtggatcgcttgagcccaggagtttgagaccagcctgggcaacatggcaaaactctgtctctacacaaaacacaaaaattagccaggcatggtggtacacgcctgtagtcccagctactcgtgaggctgaggtgggaagatcaaatgagcctcggaggtcaaggctgcactgaattgtgatctctccattgcactccagcctgggcgacagagcgagaccctgtctcaaaaaaagaaaaagaaaagaaaagttcccactattagcttattgacccaagtgaaaacttcagcacacataggatattcaacggtggggatattctgtgtcttttaaaatacaaagtggtatcctgcagaatgggtggaagagggagacctgtgaagagacccatcttttttttttttttttgaggcggagttttgctcttgtcacccaggctggaatgcagtggcacgatcttggctcagtgcaacctccgcctcccgtgttcaagtgatttctcctgcctcagcctcctgagtagctgggactacaggcgcctgccaccacatcaagctaattttttgtatttttagtagagacagggtttcatcatgttggccagcctggtctcaaactccgatctcaggtgatacacccgactcagcctcccaaagtgcagggattacaggtgtgagccaccacgcccggccaaagagacccaccttaaagtccagggagaagacacaattggcttcatgggcatgtgacctctgcagtcacacaggaccctgcatgttttgttttctgttctttgtttttttgagacaccgtttcactctgtcacccaggctggagtgcagtggcacaatctcagctcactgcaacctccatctcctgggttcaagcaattctcatgcctcaacctcccaagtagctgggattgcaggcacatgccaccacgcccagctaatttttgtatttttttaatttttattttttgagatggagtctcactctgtcactaggctggagtacagtggcgtgaccttggatcactgcaatctccgtctcctgggttcaagcgattcccctgccccaacctccctagtagctgggattacaggcatgcaccaccacgcctggataattttttgtattttagtagagatggggtttcaccatgttggacaggatggtctcgatctcctgattatctgcccgccttggcctcccaaagtgctgggattacaggtataagccaccacgcctggcctaattattgtatttttagtagagatggggttttgccatgttggctaggttgatcttgaactcctgaccttaagtgatccgcctgccttggcctcccagagtcctgggattatagcgtaagccacagcgcccggccccctgcatgttcttgacttcacgctctgctgtgttgccatcttgaaattcttaattttttttttttttttagatggagttttgctcttgttgccccaggctggagtgcagtggggtgatctcagctcaccacaacctctgcctcctgggttcaagcaattctcccacttcagcctcctgagtagctgcgaattacaggcatgtgccaccacacctatctaattattttttgtatttttagtagagacagggtttttccatgttggtcaggctggtctcgaacgcctgaccttgtcatctggccaggcctcccaagtgctgggattataggcatgagccactgcgtctggccgaaattcttaattttttaacaagaagtgctgcatcttcattttgtgctgggccccccaaactatgtagccagtcctggaagaaaacagtgacacatttatttgcatgcttactatgtgagcagcaaacaagtgacagtgctggaaccgggacccaggccgtttgggtccaaaaccacgggtcctaacctacatcttaccatacttcctgtctctcgaatcaagagggctagtgagagtggagaggaagggaaagaataagaaccttctgtttcttccaccagaacactcttcactcccctgcctctccttccttcctattgtcgtctcagtatcagtttcgtttcctcaaagaggtgtttcctggtccccaaacctaaattatgcccctctcattctctcttttctcccttagtattttatttattatttatttattttgacagagtttcgcttttgtcgcctaggctaaagtgcaatagcatggtcttggctcactgcaacctccacctcccgggttcaagcgattctcctgcctcaacctcctgagtagctgggattacaggtgcctgataccatccctgcctaatttttgtatttttagtagagatggggtttcaccacgttggccaggctggtctcgaactcctgaactcaggtgatccactcacttttgggaggccgatctccactcaggtggaggttgcagtgagctgattcagcctcccaaagtgctgaaattacaggtgtgagccaccgtgccacgtttcttctttaatattctttagagtattcatcagaactttgcgtatttatttgtatatttccttgttttaatgacaatccctcactagactgtgtgctcaatgagggcagagattttgtcgggttttgttcccttatccccagcagagaacctggcacatagtgggtatttcataaatgttagttggaaagtacagtttatagaatgtagtgacagatcagatgtaattgtagggaagcctggaggatgacctaggaaattccacttgggtgatgctaattgccaaggtgaatataggaagttaggagtgggacaggaatgattatgtggatttgagatgtgtccagttcgagggcttttgggggtggcttggagaaggcaatcttctgctgggaaacttctgactctgtccctactgcagcccagggtaggggctccctacctccacctgggcagatctctgccatcacccatctcactggcgtgctcttgggagcctatctgttccctgggcggtgcagctctacgggatttggaacagtgttgcaggtctcatctctggctcgcagggcccccaggggtgtgtatgcagtcagggctcaataaatgccagtagacggaaagaaggaaggcgaaaaatgtggccagacactcaggggagaggctggggtgaggagcagatctgggaacgtaaatagaactagaagtccaagttggaaccctggagccctagagacagggtggacaaaaaagtgttccaagccaggaggccaggcacagggctaagcgctttattcacatgactgcatttcatcttcatatctacactaaagaggcataattattcctactttgttcatgagaaaacaggtccagagaggtgacgtgatttgcccaaggtcacacagcgagtgagcagcaaagtctggatttgactcagggctgttgtcccctaagcccgcacgcactcttccacttcactccctgcctctccaaccctccacctccctatccctctcccctcccctccggcggctcccccgccccacccctctgccgttccccccaactccctccctgtcggtggcggcggcggagccacgtggtggggccgggaagccgcggccgacgagagcccgggcgactgccccagctgggcagtgctgctctgcgctgcgccgcgctcggggctcgctctccttgctccgcgctccccgccagccgccccggggcaggaggcgcgcctgacggacggcccgctagacaaaggaggcgcggctcggcggggccagcgcgcggacggacggaccatggactcggagcgcgggcggccggccccagccttggggaccggacactcccgggcccggccctaggcgcccggccccgccgcccggcgcgcccagcggggaggacgtggagcccgcgcggcgcgagcaggcggcggccgcggagcaagaagggcgccgcggcgtgcggcccgcgcagcccccggagccatgggcaagtgcagcgggcgctgcacgctggtcgccttctgctgcctgcagctggtaagcgtcgcgtgcccaggcagtcggggcagggtggggcgcggcggggcgcggtcccagggcgtgcgggtggggttgcgtgtgtctctgtgtgtgtgtctggtgcgtgtgcccgggcggggggtggtctggagtcccggagcggtcgggcggagcctgctcccgctggccgggctgtctctttgtgtgcgcttctcgctgctgtgcccggcgcccctccggtccccagtgcgtcnnnnnnnnnnnnnnnnnnnnnnnnnnnnnnnnnnnnnnnnnnnnnnnnnnnnnnnnnnnnnnnnnnnnnnnnnnnnnnnnnnnnnnnnnnnnnnnnnnnnctctgcctttctgccagggagcatccagtgagagatgagctttacaatctgcacatccctgggaggggagtcaccgacaagaggcaggctggtgccaagtgggtaaatgccaaggttgggcctggcaccaccaggcttccctcaccaccttacccaagcctgcagcttccttggtctctgcccaagccttgccatctgtgtggtagcatcagctccacctcctcctgcctccctgcctggaaaaaggcttcttatatcttctcactttatctgaatattccctccccctccccagccagaccctcttctctcctcttctgttgtagttaggactctttgttgcaaatgacaaaaatcagcaggacaaggagggagaaccagctttaggcatggctgtattcagaggcctgaaagatggctcaggacattcccttgtgtgttcagtcttcctcccacacacactctctctgtaccttagctatggctttctcctcaggcgggccatccacctgaggtggccaaggcagccaccaacagctccaagctcacaccacacccattcaggtatcctggcaggatagcagctctgttctgattgttccagcaaatatctagggtgattctcaggggcagagcatggggtgagcgcctatccctaaattcatcattgtctttgattatttggctagacttggcttacctgcccaccccagaaactagaaatgagtcagccccactcaagccatgtggacagagtggtaggaggtggttctttaaagcaaaatttggctgggcgcagtggctcacgcctataatcccagcactttgggaggctgaggtgggtggatcatttgaggtcaggagttcaagaccagcctggccaacatggtgaaactctgcctgtactaaaaatacaaaaattagctgcgtatggtggcaggtgcctgtagtcccagctactcgggaggctgaggcaggagaattgcttgaacctggcaggtggatgttgcagtgagctgagatagttccactgcactacagcctgggcgacagagcgggactctgtttaaaaataatgataataaatatttagaaataaaaaataaacgaccattttatttagttcatgattctgtgggtcagctgggagattcttctggtctgggctatgtgtctgtggtcagctagtgacccggggtgatctagcatggcctcgctcacatggttgatggctgatgggctattagccggggtgccttcgctctcctccccgtggcttctcatcctccagcaggtcagctggggcttgttcacaaggtggtcttgttataagtgaagcaagttggcaagctccaatgaacgccgttttttttttttcttttcttttttttgagacggggtctcactctgtcgcccaggctggagtgcagtggcatgatcttggctcactgcaacctccgcctgctgggctcaagagattctctcacctaagcctcccgaatagctgggactacaggtgcgcaccaccacacctggcaatggtttgtattttttgttgagacggggtttcaccaggttgcccagactggatgcatgcatttttcaagcctttttcaaacatggtttgcattgtgtttgccaaagtccctttaggcaaagcaagtcgcatgggcaagcacagcattagtgtggaagggcactactgaagagcatggaaataggaagaggaggattcgaggccaattttgcaatctattccagctccttcagggaaggggagtgaaaagcattccttctctgtagcccaggaatgccatgggccagggcaagctccagatggggatccttggaagaggtgactcgggctccaggacttccttgccctccaaggctaggggtggcagtctggattctgatcccaccatcttctccacatggagaaggtgcaggagcttgagccgctagagggaagggcctccttggcagggaggaaggtgttctgaaccctcactcctatcacctttcagcccaccccaaagtgatgatcaggcttaaggaccccccagcatccctttggtagtgaaggactggattgttctgaggcttatgcctcatcaccatggtaactggtgccacctgctccccaaggtcaagcaggaatccctgtccttccctttcaggggggtgacagtggcctcagcctgtctcttccacaggtggctgcgctggagcggcagatctttgacttcctgggctaccagtgggctcccatcctagccaacttcctgcacatcatggcagtcatcctgggcatctttggcaccgtgcagtaccgctcccggtacctcatcctggtacggctcacctagccccttcccaagccaactcctctcctcacccctgcccactccacccctccctgctcctcaaaaccagaactgccccccaacactggggcactggtcttggctccacccaaaacaagatggggtgaatgtgcacagccccatgcttctttgctcagaggagacaagggttttttttttcctgaagaattttttagggaaataatccaaatataaacaaaatggatcatgtagtgagtgcctggcacgtgccaggcacgctgcgaaatttcacatgcttcatctcatgtctacaatagccctgtgaggtagatcttaacagctccattttccagatgaggaaactgaagctcagaaaggttgcgagtcttcctaaggtcacacagctaatgaaagcaaggcaggattagaacatcagatcaacagtgaaggctcctgctgcggcaccacacggcctcaggaaggggtgggcgcaaggacacaggagggatgggcttcatcttatttagtttctcaagaagcttcaggaaggcttggcatttgtctctcttgcccgatgtacatcaaggatgtgttctggagcagctagtgtggctttgaggtcagtgcctccctgcactccagccccaggagtctgggtctctctcctcctccccgacagcctcttcccaagtcctggtccctgatagtctctgtcaaactcctgctttcagctagattcacccatattccctgctgttcctcagtgacctcttcacatggctctcttgagggaaaaggcttttcactagatttactacatacatgcttgacacctacaatcacaatgacatgcaatgtcatgctgcctccagagcccacacacactcattctaggacttctctccccacctccacaggctcagttcccagaagccaggtgaacaggaccctaacaaggctctctctcatctgacataagagaacacttctctccagttctcaggaaagccccagacaccactgtcaacaacactatctgccaggtgacagccactagaattgcaggcacaggacttgggtagaagcatccaggtctcaaatcgaccctaacctcctctccagctcactaccgtgggtggaatgctgttctccccagaggtggccacattcgggatgtgggaaaactgaggggcccaggggcctcagtgctgacctagcattgctgccccagcattgctgctcccagtccctcccatcccagccctctccttccagacagatggaaagattgctggagcggggcacattcacctgtgtcattcaagtacaatttatagagcaaggaagggagggaggaaagtgatggagtgagggcatccagggcccaggctggactcccgttctatgcttggggtctcagtttggtctgctcaccccagcctttctccaggccccatccatgatcctgcctccacctgccctggttcccttatacccagactccagccacagccatgtgagaagatgtcacacacatactcaggcacaaggctgcaggataacctcctgtctcttttggtctaaagttcccagcatccactgccctccagcctgggtgacagaccaaaatcttgtcttaaaaaaaaaaaaaaaaaaaaaaacacaaaagaattaagactttttttttttttttgagacggagtttcgctcttgttgcccaggctggagtccagtggcatgatctcagcttaccacaacctccacctcccaggttcaagtgattctccttcctcagccttccgagtagctgggattacaggcatgtgccatcatgcctggctaattttgtatttttaatagagacagggtttctccatgttggtcaggctggtctcaaactcccgacctcaggtgatctgcccaccttggcctcccaaagtgctgggattacaagcgtgagccactgcgcctggcctcttttttttttttttttaaatatgggttttctccatattgcccaggctggtcttgaactcctgagctcaaatgatctgcccacctcagcctcccaaagtgctaggactacaggtatgagccactgcacctggcccatttcctatagtcttaatgggttcatccagctattctgtgctaggcattggcattgcagtggtgagccaggcagtcagagtcctcgccctctagtggcttaccacctggaacatgtttctgaaagtgtcatctgagtcacaatctcctagggattgcttaagcaatcccttttaaacatccctagaaattcagaatcagtaggtctagaggtaggacccaagaatctgcatttttgacaaacatccttgaatgattccagtattctagagacagctggtctagaggatgttgttagcacagtggatgggattagctatcagagaacttgatttgagtggcagccctacctcctcctagctgtgtgatcttagaaaccttaaacttcctttcagttttaagttagttctctctaaaagagggcagtgctgaccttgcagggctgttgtaaggcctgatgggtgtgtaaatgatttgtaagctacactgtgctctctgagtgaggtattctcataatttcccctgcccagatctcctcatccctgagctctgtctccattgacactccccatcccccactccccaggccccaccctgatcccacctctgctttccccagtatgcagcctggctggtgctctgggttggctggaatgcatttatcatctgcttctacttggaggttggacagctgtcccaggtaagcctcagacctggcagtgccatagggcagagcctgaccattcccatcccctgccctaagggtactgtggtataggaccagagcatcatgtctcgaagaagtctctctctccttacatgcccaaataatctgtgtgccccatttcctacttacacaatttatttctggcttcctcaaacacaatgatggagcagataaggctgaagagcagtccatgtgaagatgagccaggggtcccagttgatcacaagctcagtaaaaaccaacagtatgtgggagcccagaaagctactcttaggccccgctaatagaggtagagtattcagagcaagggaggtgaaaatgccatgcgctttgtagtgcttagaccacaaagatttgggttaattctgatcaatatttttcagaagggaaagagactagttagagtttgttcagggaagattgagcagaccaagaaagtaggactgtttcgcttgaataagagcaagcccagagagacacaacttctatttttagatataaaagaggcaaaatatgtgaatttaagagcattggctttgtagtttgaccctgctagattcaaatcccagctctaaaaccttctagctgtattaccctgggcaagtggctgatcctctctgagccccagtttcctcatctagtaagtggacataagagcaactgcaacttcatgtggttgctgaggggataaaataaggtcacacatctgagtgcttggcccctggtcggcaggcagtgagtatttatctgttgaatgagtgactgcatggatgggcacatgggtacacaccctgggtaagaacttctgatctaggccagccccttctccatttaacaaatgtggagaccaaggccccaaaggagaggttcgcccagggtcgcacacagggggagcagtggagatactgaatgggctgttaaggggctggtactgaggatttcacctgtggctgggaaattgttaatgttccttccagctctgaaaattctgaggcccctgtgagtccacacaaaccccttcccatctcagtgacaaaagagtgaggcctgtgtggtcattaagtgccacctgttggtcaaatatggacttgcaggtgcaggctccctgaatcccttcaccgatcaatatagtcttcctgggctgggggagtagctcccccctccctctccctcacactcagtatcccaggcccctttgcccccaggaccgggacttcatcatgaccttcaacacatccctgcaccgctcctggtggatggagaatgggccaggctgcctggtgacacctgttctgaactcccgcctggctctggaggaccaccatgtcatctctgtcactggctgcctgcttgactacccctacattgaagccctcagcagcgccctgcagatcttcctggcagtaagtccttctgtcccccaccctacacacacttcccgatccctttctttagctctggttgaggggatgggttgggcgcagtggctcacgcctgcaatcccagcactttgggaggccatggctggtggatcacctgaggtcaggagttcaagaccagactgaccaacatggagaaaccccgtctctactaaaaatacaaaattagccaggcatagtggcacatgcctgtaatcccagctactcaggaggctgagggaggagaattgcttgaacccaggaggtggaggttgcggtgagccaagattgcaccattgtactctagcctgggcaacaagagcgaaactcctttaaaaaaaaaaaaaaaaaaaaaaaaaaaaaaagagggaatgaacctaggtcttccgcctgtctgtccttttgtctggatctgtttccatatcctgtaccgtcttccctcaccgctgccccagcccctgtgcagagtgaacaggtttagtgagtaggatgaggcatcagactatgaatcaatcctgggtttaagtgctcaatacacccactatgtgactttggacaagtcacctgccttctcggagcttgtttccttattcacaaaaaagaatgacaataccagcctcagagttgtgagaataagaaagtgaccccagtgggcgtgatgcctcatgcctgtggacccagctacttgagaggttgaggcaggaggatcacttgagcccaggaggttgaagctgaagtgagccatgattgcagcactgcactacagcctgggtgacagagtgagaccctgtctgaaagaaagaaggaaaggaagggaagggaagggaagaaaaaaaaaagaaagaaagaaactccaagataggagtagttcctgtttctagaagggccagccctgtcctaggcactttgtacccacaaagtcacataatcctctttcttcttaacaagccataaggtattgcccaagtccaagtgggaaaactgaggctcaaagaggtaaaatgattacttgtctcaagttacactttcagaagagttagaccatgtatgtttgactttaaggtgaaaacatttaattggaagttgttacggtttgccttcatcctggcatgcctcctcccttgccagtcagagcgtacagggcccggcagggggcggaggaagaggttcccactcctccttcctccctgacgtgtcatctccactcccagctgttcggcttcgtgttcgcctgctacgtgagcaaagtgttcctggaggaggaggacagctgtgagtaaggcgcccctggggaagtggggaatctggccctgcgccttcagcaccctggacagaggcctgtgactggccccggcgggagggagcccagggtcggccacgggcccctttcgaggggaagaggcggctggtatggaaggctctgcataccagcccgttccaggctggggtccagacgtccaggtgcccagtccctggccccagcaccccctttccccaatctcgccccaccccatcagaggtcttgtcccgtttagaggctctagccccgcccctgagagccttctctcccataggactgcccggcctcccaggcccaagccttaaggactggggcctgaccctcagctggcccggcctcgccgcctccagacccccagaggcccatccctcagggtccagccgaagccccgccccaggccctgcacggggtctgaccctcgcccctcccctcctcatggcttctctggctccgcttcctagggtgggagtcctgccctcagattcttccccttcaggacccagtctccctctcctcgcccccgccgccgatccctaacatgcgccgcccctcttccgcagttgacttcatcggcggctttgactcctacggataccaggcgccccagaagacgtcgcatttacagctgcagcctctgtacacgtgggtcacggccccctgctggcttggggaggcctgggcgtcggggttgcgaaaaggaggggatggaggagtgggcagggcaaccgggtctctccgcccccatacttttgggatccactctccctaacctgcctttgtttcccgcaggtcggggtagcctctgccccgcgcccaccccggcgcctcgccctgggctgaccgcagctgccgcgagctcgggccaaggcgcaggcgtgtccccctggtggcccgcgcgctcactgcagcctgtgcccaaccccgcgtctgcatctggagatgcggacttggacgtggacttggacttggacttggatttgagcttggctcttcgcagcccggacttcggaggagtggggcggggcgggggaggggcaccacgggttttttgttttttgtttgtttgtttttaatctcagccttggcgtgagctggggccttcctctcttctccagcctctccctttcactcttcacccagcatcctgcccccctgtccaaaaacagcaggacatcagacccatcccatcccaccacactcactcaccagctctggggaaagctactgtgaactaggagcaggattcctgggttctaatcgcaggtccatcactgactgtgacgtctagcaaagcccttgccctctctgagcctcggtttccgcacctcaagtaattaatcccttagcaaatggactcttttagacttctcatttaactcaattccctgagctagactgggattaaaattctcattttgcagtacattaaaactgaggcccagagatgtgatttgcttgaggccacacagctagatttttggtggaagtgggccttgaacacagtgtactttctgcagtttctgactgtaaaacccagtgtctgctctctgagttccatttccaagcccccctccatcttggacctatgtggtctccaccatattcacacaccaccaccaccacttgccaatgcctctcttaaagcaatatacccattcgttctcttattgggaactggatggatgaagccccaaattcagccccacccacagagaagccttcctacactcagcctctgtccacccttggcaaatctttcaagctctctcctccaggaaagtggggccccaactcagtcactccacccccttccaggtccctgaggctggttctactgtatccccatcacctccacaactccactcacccctgacggctccatccacctcaccagttggaaggcttgtggtttcagagaggagcaatgctggtcagcgctgcccagactccagtgtttacagatcaccagcatttacaaccaatccaatggccagaagcctcctctaacaagcccagaaggagttctgaaggggcagatgggggtgtgagtagtcggggagtcgggattgccagcaccctcacccttccttgggggcaagtagaggtgagaacactttccccacctccctccacagacactcctgaggacgctgcatcccacgcactgcctggtgcgtccatagagagaggatcaggtctcagcatttcatctgtgaaagaggcatggccctgggttagaaaggagggcaggagacatggaggaactggggggcacccagatggtgcagatggtttgcacacctgagcctgtctgtggtgaccattccgctcctctcccactaccctccaatctatcattccctactctctaaggccaaaatatcctgagcaaggctggcaaccccaccccaccatcccaaatgcaagcagccaggcccaggagttcctctggcccccacaggcatggagctcccagctggtgggtacagcttgagaggggggcagctccctcaggctaagctactgcccttcactgggccagccctgcctccagccctcacctctctcaccccaactctcccccaagcccctttctactcaacgggtgtagccactggtgctttgaagccttttgtttttataagatggtttttgcaaggggaccaggttctcttttcactgggaccttgcaaggaggggagtgctctcctggtttctgtgcaggcgggttgattaaagatggtgttttcttctctatcttcctgtcctgcccattgggtctatagaactttctaagtgagaagtccctgcatgagggcaggcaggaatgatttgatgttgatgttatcaaatattcctggggtggccaggcacggtggctcatgcctgtaatcccaacacttttgaaggctgaggtgggcagatcacgcgaggtcaggagtttgagaccagcctggccaacatgatgaaaccctgtctctactaaaaatacaaaaattaggcagggccgggaggctgaggaaggagaatcacttgaacttgggatgcagaggtggagtgagctcagatggcgccactctaccccagcctgggtgatagagcaagactccatctcaaaacaataaaaaagaaacaaatcctggggcactggcctgtaactctgactgggtgtgtagctttaggcaactcactctccctctctatactcatccaaaaaaaaaaaaaaaaaaaagcagaggtcaaacaaaatcagtgggttcccaaatgtggcttcataatcccttagagatcttcctacttattttcctgataaaatgcattttaagtttatgctttcaaatatcctttgcatcttggctcttcctgagaattcagttccgggtgtggaatgaagtgacacacagtgctttagacacggattcctgcatccaacctttgatatcctggatacttttctggggatacagcgcaagaatcagtatttagaatgttttaatttgtgtgtcggcaggtatgtgggtgaacgggtaatatgtatataaggtacagaagtcagaaggtcccagtgggattatatactcatacctttttttcatatctttctaaggataggccttttttaaattatacaatttttggtcaggcatgatggctcatgcttgtaatcccagcacttttggaggcagaagcaggaggactgcttgagccccggagttccagactcaccttgggcaacatagggagacctcatttctttaaaaaaaagaaaaatgtaaaaattagctgagcatcgagtggcacatgcctttagtcccagctgctcaggaggctgagtcaggaggattgcttgagcccaagaagttgaggttgcagtgagagctgagattgtgccactgcactacagcctgggaaacagagtaagactgtctcaaaaacaaacaaacaaaattacacatttttttgtttttcacacaaatggcaacatattctacttactctttgaccccctgctttttttccccccccttgagatagagtctcactctgtctcccaggctgaagtgcagtggcgcaatctcagcttacttttacctccgcctcctgggttcaagcaattctcctgcctctgcctaccgagtagctgggattacaggtgcctgccatcacacctggctaatgtttgtatttttattttatttatttacttatttatttatttttgagatggtgtctcgttctgttgcccaggctggagtgctgtatttttagtggagatcgggtttcgccatgttggccaggctggtctcgaacttctgacttcaagtgatccacctgccttggcctcctaaaatgctgggattacaggagtaagccaccacacctggcctctttcacttaatcttggaactcctcccccaataattcctgtggagcatcctctttttcttccatggtgacaggtcttaatgcagctggcaggtaagaatcagaggtccttaaataatgatgccccaggtcagttatgcaaacccctgtggaccactcctgaccatggggtccagaggaaaataagccacagacacagaacctccaaggagcttctgatcttctgctgatagcgggcagtcaatgctgagggcacagagtagagtgaaaggcaatcattaataggagttcaggagagagatctgagtgccccagcagaggcaacagcatgagcaaaatggtggaggtaggaaaatacatagtggccgggtaagaatagttggagacgaattggttggagaaggcttcagtagataatatatttgtttatattcgtttcctatttctatttttctttttcttttttttttttttaaattgatcattcttgggtgtttctcgcagagggggatttggcagggtcataggacaatagtagagggaaggtcagcagataaacaagtgaacaaaggtctctggttttcctaggcagagtgtttgtgtccctgggtacttgagattagggagtggtgatgactcttaacgagcatgctgccttcaagcctctgttaaacaaagcacatcttgcaccgcttttaatccatttaaccctgagtggacacagcacatgtttcagagagcacagggttgggggtaaggtcatagatcaacaggatcccaaggcagaagaatttttcttagtacagaacaaaatgaaaagtctcccatgtctacttctttccacacagacacagcaaccatccgatttctcaatcttttccccacctttcccccttttctattccacaaaaccgccattgccatcatggcccgttctcaatgagctgctgggcacacctcccagacggggtggccgccgggcagaggggctcctcacttcccagtaggggcggccaggcagaggtgcccctcacctcccggacggggtggctggccaggcggggggctgacccccccacctccttcccggacggggcggctggccgggcagaggggctcctcacttcccagtaggggcggccgggcagaggcgcccctcacctcccggacggggcggctggccgggcggggggctgacccccccacctccctcccggacggggtggctggccgggcggggggctgacacccccacctctctcccggacggggcggctggccgggcagaggggctcctcacttcccagtaggggcggccgggcagaggcgcccctcacctcccggacagggcggctggccgggcggtgggctgacccccccacctccctcccagatggggcggctggccgggcagggggctgacccccccacctccctcccggacggggcggctggccgggaggggggctgacacccccacctccctcccggacggggtggctgccgggcggagacgctcctcacttcccacacggggtgttagccgggcggaggggctcctcacttctcagacggggcggttgccaggcggagggtctcctctcttctcagacggggcggccgggcagagacgctcctcgcctcccagatggggtcgcggccgggcagaggcgcttctcacatcccagacggggcagcggggctgaggcgctccccacatctcagacgatgggcggccgggcagagacgctcctcacttcctaaatgggatggcggnnnnnnnnnnnnnnnnnnnnnnnnnnnnnnnnnnnnnnnnnnnnnnnnnnnnnnnnnnnnnnnnnnnnnnnnnnnnnnnnnnnnnnnnnnnnnnnnnnnnagtgcgtcctgtgcgcgagtccccggcccgcccgcactgtacaagtggcctcctgttgggggatgcgctgtgggacggtggcttgctg

SEQ ID NO: 2052 - protein, 938 aa, Homo sapiens
  MOD_RES (363)..(396): Variable amino acid
MISISDEETGSAVLSDLLLVMAVAISQWDPGWDREAARLQKPWKKDRREGCACVRVCECVCAHVFVRARACVHVCMCVCVRVCVHVPHALFHFTPCLSNPPPPYPSPLPSGGSPAPPLCRSPQLPPCRWRRRSHVVGPGSRGRREPGRLPQLGSAALRCAALGARSPCSALPASRPGAGGAPDGRPARQRRRGSAGPARGRTDHGLGARAAGPSLGDRTLPGPALGARPRRPARPAGRTWSPRGASRRRPRSKKGAAACGPRSPRSHGQVQRALHAGRLLLPAAGKRRVPRQSGQGGARRGAVPGRAGGVACVSVCVSGACARAGGGLESRSGRAEPAPAGRAVSLCALLAAVPGAPPVPSAXXXXXXXXXXXXXXXXXXXXXXXXXXXXXXXXXXLCLSAREHPVRDELYNLHIPGRGVTDKRQAGAKWGGDSGLSLSLPQVAALERQIFDFLGYQWAPILANFLHIMAVILGIFGTVQYRSRYLILYAAWLVLWVGWNAFIICFYLEVGQLSQDRDFIMTFNTSLHRSWWMENGPGCLVTPVLNSRLALEDHHVISVTGCLLDYPYIEALSSALQIFLAGAEEEVPTPPSSLTCHLHSQLFGFVFACYVSKVFLEEEDSSPWTEACDWPRREGAQGRPRAPFEGKRRLVWKALHTSPFQAGVQTSRCPVPGPSTPFPQSRPTPSEVLSRLEALAPPLRAFSPIGLPGLPGPSLKDWGLTLSWPGLAASRPPEAHPSGSSRSPAPGPARGLTLAPPLLMASLAPLPRDPVSLSSPPPPIPNMRRPSSAVDFIGGFDSYGYQAPQKTSHLQLQPLYTLCPAPTPAPRPGLTAAAASSGQGAGVSPWWPARSLQPVPNPASASGDADLDVDLDLDLDLSLALRSPDFGGTGRPGRDAPRLPDGVAAGQRRFSHPRRGSGAEALPTSQTMGGRAETLLTS

SEQ ID NO: 2053 - DNA, 1453 bp, Homo sapiens
  source (1)..(1453)
  CDS (201)..(1253)
  modified_base (391): a, t, c, g, unknown or other
ccgggccacgtgaccgcgcgtgcacgtgttccggcctctccgcttcgccgctccgaacctcctcctggtcgtcccggcattcgtccacgcggagccggcttgggcggggcccgggaggcggcggccggagaagccgcggagacgcgagcgccgagcgtcgcgagggagcaggcccgggcaggcaagcggcggcctccgccatgaaccccaggggcctgttccaggacttcaaccccagtaagtttctcatctacacctgcctgctgctcttctcggtgctgctgcccctccgcctggacggcatcatccaatggagctactgggccgtctttgcccccatatggctgtggaagcttctagtcgtcgcaggcgcctccagtggggtgacgtntgtgggaccagccgacatctgctaccgcaccgagggagaggcctgtgtggagttcaaagccatgctgatcgctgtgggcatccactgctgctgctcatgttcgaagtcctggtctgcgaagggtggagaggggcaccacttctggctgctggtcttcatgcctctcttcttcgtgtcccccgtgtccgtggctgcctgcgtctggggctttcgacacgataggtcgctggagctggagatcctgtgctcggtcaacatcctgcagttcatcttcatcgccctaaagctggacaggattattcactggccgtggctggtggtgtttgtgcccctgtggatcctcatgtcgttcctttgcctggtcgtcctctattacatcgtctggtccctcctgttcctgcggtccctggatgtggttgccgagcagcggagaacacacgtgaccatggctatcagttggataacgattgtcgtgcctctgctcacttttgaggtcctgctggttcacagattggatggccacaatacattctcctacgtctccatatttgtccccctttggctttccttactaactttaatggccacaacatttaggcgaaaggggggcaatcattggtggtttggcattcgcagagacttctgtcagtttctgcttgaaattttcccatttttaagagaatatgggaacatttcatatgatctccatcacgaagatagtgaagatgctgaagaaacatcagttccagaagctccgaaaattgctccaatatttggaaagaaggccagagtagttataacccagagccctgggaaatacgttcccccccctcccaagttaaatattgatatgccagattaaactcctagagaggacccaggcacacacagactccacttggccttcgcctcttgttcattcatcccaaacctggaaatggaaacaggcttcaaacactcgtctcacgccgtgtttgagatcaccgcctcatcagtatgcatcatagatggaggtggtttcagtatgtgggtgtgtgtgatgtgtacctgggtaagagactt

SEQ ID NO: 2054 - protein, 350 aa, Homo sapiens
  MOD_RES (64): Variable amino acid
MNPRGLFQDFNPSKFLIYTCLLLFSVLLPLRLDGIIQWSYWAVFAPIWLWKLLVVAGASSGVTXVGPADICYRTEGEACVEFKAMLIAVGIHCCCSCSKSWSAKGGEGHHFWLLVFMPLFFVSPVSVAACVWGFRHDRSLELEILCSVNILQFIFIALKLDRIIHWPWLVVFVPLWILMSFLCLVVLYYIVWSLLFLRSLDVVAEQRRTHVTMAISWITIVVPLLTFEVLLVHRLDGHNTFSYVSIFVPLWLSLLTLMATTFRRKGGNHWWFGIRRDFCQFLLEIFPFLREYGNISYDLHHEDSEDAEETSVPEAPKIAPIFGKKARVVITQSPGKYVPPPPKLNIDMPD

SEQ ID NO: 2055 - DNA, 1141 bp, Homo sapiens
  source (1)..(1141)
  CDS (201)..(941)
  modified_base (98): a, t, c, g, unknown or other
  modified_base (112)..(113): a, t, c, g, unknown or other
  modified_base (116): a, t, c, g, unknown or other
  modified_base (128): a, t, c, g, unknown or other
  modified_base (139): a, t, c, g, unknown or other
  modified_base (148): a, t, c, g, unknown or other
  modified_base (166): a, t, c, g, unknown or other
  modified_base (212): a, t, c, g, unknown or other
  modified_base (240): a, t, c, g, unknown or other
  modified_base (574): a, t, c, g, unknown or other
  modified_base (811)..(910): a, t, c, g, unknown or other
taataatgcctctagccttgggaggtggtggccgttagcatcacaggccttgagagagttctgtttctaagatcttttcttgctctgccccaccggtnaatgcttttgcccnngcnaagtaagtcccngggcagtctcngtcgggcanttactctttgtcatgttnaaagagagggtttgtgtgagacggctggtgtgggatgagctgctgngcccactgtttctttgcctttacttgcngtcgcgtttttgcttggtcctggttttttttgggggttcccatttcttttcgcacccccttccactttggggcggggggccttttcctctttctcggggtttcccccccctaccgccttttttctccctcttctcctcttttctcgcttgtctcctttctgcctctgctccttgggtctctcttcctccctttgtcctttgcttttttttttccttttgttctccgtgtctccttggtccttggttttgctcgttttccttcttttctcttctttggcggttgcttcctttctttcccccccccggttggtttgtgtcttcgttgttttctccntcctctcttcttttttctcttctctctcctcccctctctccctcttcctccctctcttggctctcttccccgtgtcgcccccccctccttgttcttgttttttgctccgcttgtttctccccctccgctgccctctcctcctccctcttcgctctgtcttctctcttgctctccggttttttgccccgtcgtggtctatcttgcgactttttctctagtgaaaatgctccactttgnnnnnnnnnnnnnnnnnnnnnnnnnnnnnnnnnnnnnnnnnnnnnnnnnnnnnnnnnnnnnnnnnnnnnnnnnnnnnnnnnnnnnnnnnnnnnnnnnnnncttctgcaaaagaatcataaaaaaaccttaaaattcgactgatagcctggggaaaatatttgcaacatattcaagagtcaaaatattaatatcctggccaggtgcagtggctcatgcctgtaaccccagcactgcctgtaataccagcactgtcggaggacgaggcaggtgaatcacttggagttcaggagttcaagaccagcctgggcaaagtggaaaaagtctgtcact

SEQ ID NO: 2056 - protein, 246 aa, Homo sapiens
  MOD_RES (4): Variable amino acid
  MOD_RES (14): Variable amino acid
  MOD_RES (125): Variable amino acid
  MOD_RES (204)..(237): Variable amino acid
MSCXAHCFFAFTCXRVFAWSWFFLGVPISFRTPFHFGAGGLFLFLGVSPPYRLFSPSSPLFSLVSFLPLLLGSLFLPLSFAFFFPFVLRVSLVLGFARFPSFLFFGGCFLSFPPPVGLCLRCFLXPLFFFLFSLLPSLPLPPSLGSLPRVAPPSLFLFFAPLVSPPPLPSPPPSSLCLLSCSPVFCPVVVYLATFSLVKMLHFXXXXXXXXXXXXXXXXXXXXXXXXXXXXXXXXXXFCKRIIKKP

SEQ ID NO: 2057 - DNA, 1417 bp, Homo sapiens
  source (1)..(1417)
  CDS (201)..(1217)
ttttaacctatatatacgtatacagactatatgcatgtgtatatacgtgtgtatatacatatacacatacacactatatatacacactcctccatatatataaaatatattcttatagatgtatatttttgttttttaaatgtgtgtatatacacatatacacactatatgtgtgtatatacatactatatacacactatatgtgtgtatatacatactatatacacactatatgtgtgtatatacatactatatacacactatatgtgtgtatatacatactatatacacactatatgtgtgtatatacatactatatacacactatatgtgtgtatatacatactatatacacactatatgtgtgtatatacatactatatacacactatatgtgtgtatatacatactatatacacactatatgtgtgtatatacatactatatacacactatatgtgtgtatatacatactatatacacactatatgtgtgtatatacatactatatacacactatatgtgtgtatatacatactatatacacactatatgtgtgtatatacatactatatacacactatatgtgtgtatatacatactatatacacactatatgtgtgtgtatgtacatactatataacactgtgtgtgtacatactatatacacactatatgtgtgtgtacatactatatacacactatattgtgtgtacatactatatacacactatatgtgtgtgtacatactatatacacactatatgtgtgtgtacatactatatacacactatgtgtgtgtgtacatactatatacacactgtgtgtgtgtacatactatatacacactgtgtgtgtgtatatacatactatatacacactatgtgtgtgtgtatatacatactatatacactatgtgtgtatgtgcatactatatacacactatatacacactatgtgtgtacacacactatacacactatgtgtacacacacactatatacacactatgtgtgtacacacactacagacactatgtgtgtacacacactatatacacactatgtgtgtacacacacactatatacacactgtacacacacactatatacacactatacatactacatatatactatatagtgtatatgtatatatgtgtatatacacataatgtatatatatttacatcattcatgagcacttatttaatttaatcagtttttgtggtttctgcactgtttcttgtagttcatatcatcatttttctttgatttattggtttttgctagaattaatccttaagaaattcttttagagcttggtatgggttatacttaagtccttacatacctgcaaatgatttcaatttgccctcctacttgaatgctaatttgactaggtatgcgattctaaa

SEQ ID NO: 2058 - protein, 338 aa, Homo sapiens
MCVYTYYIHTICVYIHTIYTLYVCIYILYTHYMCVYTYYIHTICVYIHTIYTLYVCIYILYTHYMCVYTYYIHTICVYIHTIYTLYVCIYILYTHYMCVYTYYIHTICVYIHTIYTLYVCIYILYTHYMCVYTYYIHTICVCMYILYNTVCVHTIYTLYVCVHTIYTLYCVYILYTHYMCVYILYTHYMCVYILYTHYVCVYILYTHCVCVHTIYTLCVCIYILYTHYVCVYIHTIYTMCVCAYYIHTIYTLCVYTHYTHYVYTHTIYTLCVYTHYRHYVCTHTIYTLCVYTHTIYTLYTHTIYTLYILHIYYIVYMYICVYTHNVYIFTSFMSTYLI

SEQ ID NO: 2059 - DNA, 14562 bp, Homo sapiens
  source (1)..(14562)
  CDS (201)..(277)
  CDS (10102)..(10174)
  CDS (10895)..(11066)
  CDS (11315)..(11635)
  CDS (12223)..(12333)
  CDS (13893)..(14362)
tttgccagggccacggcgtggccaccaaagcgctccaggacgactcggcagagcgcgggcaccgtggctcaggcgcgctccccgggggcggggcgagcaggaggggtcacgtgacgcccggcccggaagcgctcgcgcaggagaccccgggtgacggggcccggcgccgctaactggagcgaaccccagcgtccgccgacatggcctggaccaagtaccagctgttcctggccgggctcatgcttgttaccggctccatcaacacgctctcggcaaagtgagtctgggccctgccgggcgtgcgggccctggcgaccccggcgctcgttctacgccttcccccttcttggccctgccctcctggcttcccctgctttcccacttgctccggtcagttcgcgcgcgttatgaccacccaagggatgcgaggcccggggaaatgcggagcggggctgcgccccggacggggggatccgagccccggctttgatttgctgtacagcctccgctcctgtttccacgtcttttaacaggagggttggccgattcctttccacggcccttccagtgctggcgtccaagcctgagcacctccctccacgagctgggagagacccctggacttgtgcacatgagccgcagtagtggctgtgcaggccgagtgacccagtgagcgtggaggcctcaagcggcagacagggaggtgccccacggcccctcaaggatgaggggttagagctgtgctttgaagcttaggtgggatttcggaatgtgtctgagactgtaagtcaaggaaagtctacggaaaggccagatcaaagtcgattgtaaccagcatcaaatgcccaggttagattttctctcataatcagaaaagtgcttttgagctggggaatgacatgttgaaagtgatatgattgactcaatgacatgaggagtggtttggtgcaggaaaaaccactccaaggctgctgcatagcagatgaggggaactaggaggtggcagtgagaagagaaaggaagggacaactggtggcagagaccaggtgtgaatggccacaggcctgacccacatgagcaagaaacaaggatcactccagggtttctgcctgggagaagaaaagtgccattaactcagacagagagggcaagtggccagttcagctctgatgtatgggggtgagaggggggacagttcccaggaggttagggactaaggacccaggcagtcatgagactgagggacagggcctagcctcccctctgttgtgggcaggatggcatttctttgtctctctctgtctccatctcagggcagggccttcctgcccctccttttcttgttgcccaggctggagtgcaatggcacgatcccatgtataaggtacctacggtgtgtaagggaaggggacagaagtgaccaagaggcgatctctgcctttgagatgcttggaatctgaggtggaggagacagacgtgtacgcacacgacagtcacagtgttctcccttccccaaacggtgggcacagtcagtggagtcctgggtgggccccacctgttcctctggttcacctctggccaactgtgccttgtggagaactactagcttcccaggccctgcatcctcctgaggatcactcctcatgctgaatccttagctgttcagaggccccagcctgagggctcccatctcaggatctgaacacagcaaagcaagtcttctgttctgtcatgccagccagggcctctgtcaagtgcttagagagcggttgtaagtccaccagggctgctgcccacaaggagaatccagattgccagttactgctggggtaaactgtgctgattcacctccttccttagaaaactccaaaccagtcaggtaggaagcttagagatcctcaatcccagaaggcgtcgcctttaaaggctgcctgagagtcaggaaagaggctcccaggtgacagacccaacttttggtcctgtcccctgcctgacagctggtgtggggcctctcaggatcctcccaccccaagatgggcccccaaattggaccctaaacagtgttctaaggtcaaaccacaagaagggatactcttagggagaaagaacatgtgggagcagctgcatgcaccccgatgtgaagtatggatttgaaatcacatttctggcccggcgcggtggcttacgcctgtcatcccagcactttgggaggcagaagcggctggatcacttgaggtcaggagtttgaaaccagcctgaccaatatggtgaaactgcatctctactaaaaatacaaaaattagctgggcgtggtagtgcgcacctgtagtcccagctacttgggaggctgagacaggagaattgcttgaacccgggaggcggaggttgcaatgagccaagattgcaccactgccctccaacctgggtgacagagtgagactcggtctcaaaaaaaaaaataaaaggaaatcacatttttgacccacgatttccagcaggcacagacagacaagcatgtgctgacaactagcagaagcatctcatgcacaaagagcacctcgcatgccccaggccctgctctgccctttcatgtgtgaactcagggaattctcataaccaccctatcaggcaaagacaggggctgatattcctgtataaggaaactgaggtaggaaatgattaaattccttgcccaagttcaacttagctactaagtggcagagtttatagttgagccagcatggtctggctctagcatccatgctcttaaccaccactggagggtgtggctggggacttctccagtcattttggggtcatttagagttgttaaaagcatagaaatcatccagtctaatccccacaatttacaaaggaggcctcaggagaagtttctttctgtgattcaactgtttggtgtctgaatgaaggctggaacccaggcctcaggactttaagtcctgttcttttatgactgtgataccccagagtccctccttcctgggagtttcctctcacagctccccaggccaggacagagaagcctgtgcttgtggaagttgtaaacctgtaagtggcatctgcgctcccagcctttgatgtgcctctctccaggactgggctgccagcctctcagccagcccagagacactgctgacagggtcctcccgctggagtccaggccactcaaggttcagactgacagcctgtggttgtctctggcagtttcttggcctgtgacaagagtgatgtttcccttcccaggttcttgggaggatgaaaggcagtggatgaggaagcacatctgagcacgtgctgcctgctgtgctggggcggcaggtcagctttcctctctgcggccccatccctgggtcctggcagggggcccctccctgtgaagtggcttcttctttccctggctgttttctcaaaacctcctcactagcaccttctgtcgatcatcttctttaggccaagccatttctgtctacgtgagccagtgccccatccacaggtactcatttcagaaccccagtctcctgaatccaactgaggttctacatatgaagagccggggtcagctgggcactgtggctccagcttgtaatcccagactggaggctgaggtgggatgatcatttgagcccaggagttcaagatcagcctggacaacatagggagacctcgttctctacaaataataataataaataattaattaatagagccagggtcaagtagatgctcactaagtaaggctcagctcccctcctaagttctgcaggctgtagggccctcccagccaggcagggatatgagcctgacttcctttcatgcccaggccagggaccctgccaagaaggtggcaggaagcctggaaaccactaggcctctactagagaagaggtgtttgctcttcttctgtgtcctttctgtgccagctccaatgtttgcccttggcagctgccccaccacccttgggttccatgaactggcatgggataattgcttcaaaggggttgttgggccagcttgtggaagccttaactcaggaggacagtgtagtagagtgggaagttcatgaggcttgggacctgaggaatagatgagccactggacctctgtgagcctcagttttctcatctgtaaaatggacttggtgatccctgccgtaccttcttcctggacactgaagatctactgaggaaggtttccttttttttttttttttgagacggagtctggctctgtcatccaggctggagtgcagtggtgtgatctcagctcactgcaagctccgcctcccgggtgaacgcattctcatgcctcagcctcctgagtaactgggactacaggtgcctgccaccatgcccggataatttttttgtatttttttagtagagacagggtttcattgtgttagccaggatggtctcgatctcctgacctcgcccatctcggcctcccaaagtgctgggattacaggcatgagccactgtgcccagccttttttttttttttttttaagacacggtctctctctgttgcccaggctggagtgcaatggtgccatctaggctcactgcaaccttgagccatcctcccacctcagcctcccaagtagatgggaccacagacacccgccaccgtgcccacctaatttttgtattttttgtagagacagcgtcttgccatgtttcctaggctggtctcaaactcctgggctcaagcaatccacctgcctcagcctcccaaagtgttgggattacaggcatgcaccaccacacccagcttaaggaaagttttccattccatggagatgagagggctcaccattgtcacctcaggagccagggccacctgctgtggcaccccagagagtggagaagccttggcccttctgtaggtcccaggcaggagaaagaaggggactcactgggcttgacaagctggggacacaagaggaagtggcagagattctgtgggaatggccacagctaatctgcccaagccagccccatcgccacttcctcagtctgttttcgccacccccgttcacgtggacgtgcacacctcccagaatgctgagctttgagtttgggcctggccatgctagggagtgactcaccacccagcacggagagcctactccccagcctgcccgccaaaaggagcggcctcagcttgtccccgctaggacccttcgggcctcctgccctggaggtcatctcccctagaatacagtgtctgtggagaagacaggcccacctactgggctgcccctctcctcccaccagctaggggagcaagaactcagaggagagcttcagagcatcagggagggggcgcatgactgcctgctgagcttccagtgtactggccctgtttcaacatctgaggagccgtgagcccctcgagccctctctggcccctgggttcctgtctgtcaaataaggagttcagctgatggctgagtttcttctgtttcagcattttggctctgtgaactgcagggacaatagcctgaggtccctccagccacctctgcctcagccagcaggacaggttccagacgtttttccagtagctttcaggctgaaggggagctggggccacgctgaacccaagggggagatggcttctgctcagtgaagggaaaggagaaggggcagaaaatgagttttgctgaatacctgccatgtgccaggtcatgtatatatccttatatcatgtattgcttctgacagtttgtcagtgttggtatgattaccctgtaacttgtccagcctgtgggactcaaaactctgggttttctctgtattctgccttttctgagtataaattcaagcaaggtttaaccctggatctgccttaagcctcagagtccccatctaaaatgaggatccttgttgtaaggcttaacgggacagtccccatgaagtgtcctatgaattgtgcatttaaggaaacatgggctgggtgcagtggctcacacctgtaatcccagcacttcgggaggctgaggcaggtcaatctcttgaggccaggagttcgagactagcctgggcagcataaacaaggctgcatctttgcaaaaaatacaaaaattagccgggcatggtggcccatgcctgtagtcccagctactcaggaggctgaggtgagaggatcatatgagccttgggaggctgaggctgtagtgagccgtgattgtgccactgcactccagcctcagtgacagagtaataccctgtctgaaaaacaaaacaaaaaaacaaacgttgttggccggacgcagaggcttatacctgtaatccgatcactttgggagattgatacgggtggatcacttgaggtcaggagttcgagaccatcctggccaacatggtgaaactccgtctctacaaaaaatataaaaattagctgggcatggtggtgggtgcccgtaatcccagctacttgggaggttaaggcaggagaatcacttgaacctggaaagcagaggttgcagtgagccaagatcgcgctgctacactccagcctgggtgacagagggaggctccgtttcaaaaaaaaaaacaagaacaaaaacaaaagacaacaaacaacaaacgttgtgaagaactgacagcaaagtgctgcccaccttaggggtcactgctgtcatccccaggcaaactggggctggatttttgttctagcctgtgaggctggggtcttttctgattctgcgccaggagtcgaaacctgtctccaatccaggatgagaagcctggctttctgccccaaggtacctgcaggcctgagcatctcaggctgggcaaggcagcccatgctgctgacacccaatcccttgggctgtcagcctgccccaggccctcagatacaaagagataccatttccccagccgggagcgctgccagccaggcctgtctaggcagacctacccgtggagaaagcgaagacaacccctgtgggaggtggggagctcagcaccagccctacagtcagctccccaagaagcgccccagccttggggaaggacaggccccgaggggtttcccctatggaccaacttgttctaccagcagggggccctcagactcaggtgggaagtaggactcatggaaatgtggcctcagcttccatacctgccccctacagacaaaaataataataaaataaataataatccttgcctgaagcttctgatcaaccttcatggcctggcaatagctcccttgtccctcctagaggaaacttggctcctggcctggggattcccatctctctgacttcacttgctctgggcagttggctctgtgcccttggtaaggcttgacctcttctctcttccttgctttgcctctgtttcactcagttgcctcatgcaggccttctcagggggctctttctgcaaaagcaagactgggttcgagagcagccctgctgggtctgtggcccttacccatgttccatgtcctgtcctggccagggatccaagagccaacagcatatcaggcagaaattaggcaccatgggtgcagtggctcatgcctataatctcagcaactcaggaggctgaggcgggaggattgcttgagcccaggagttcaagaccagccatggcaacatagtgagaccctctctctaaaaaaaaaaagagaaagaagtgagactccagcccatgaggtcaggtgtttcctgacctggggtggaggcttccccagctcccagactccctgttccatagcaggcgctttctttgccccactggtactggttacagcctggtccccaagccatgccaggctccaggtttctctctgccttctaaacagttctgtccgaacttctcccttcaactctcctttgcccctgccattcccaagaaccacaaggaatcttaactacccctctttctccacatctccaggagctggtggggtctctcactatggaataggtttgccatagccctgttttcttccgcaaactcagaggcatatagagaagccaaagctggacagggactttgtcaaacctagaccctaactgcggcacaaccagtggcacatgctctgggtgctgcgggggaggtacaggaaccagaggactcccccgccctttgggagctgaggctcgctacagagatgagccaatggcagtgcagggctgtgcactgcaatctgactgccctggaaagacatttcaaggaaaggcatttaataaaaagaagtcccgagtcttgcactttaaagacatccactgcctatgcaggatatgctgcagtgggagcaggtcggtggcccacaggaaacggctctgggactgtgttgacttcagtcagcacatgatgttactgatgcatttggagctgtgtcaacgaacccagggtgtcaacatgagggagggccacgccttgctagcctcagtctgggccagatcacatgctcttggctctgggcctgggtacaccagagtacttccagaagtcagtggccaggggtgaaaggttaggagaggctggagctgtttagccaggagatgagaagattcagaagaaggtcaacaagtccccaggtacctaaagggctttcaaatgaaagattagacaagattccacagacctaaccaagcccagcaaagacgaaattcaagacagagaattttcatgcacagatggcagacagttcagagtgattggtggttaagctgcccaaagcactatgccacaaaggattctgggcttgtgtctaggctcatcggggaagtatgtcataatcagtcatcaccatctgccgggtgctgactgggaggtcatgccatgagtgtgatgtctttgccacctgcttgaaagtcagcattagaaagatcttccaaaccattcaggctttttgaaggtgagcaggtggtctgtattaagtcatttcccaggacccaaatactcctgtagaccagaggttcttgatatttttcatgccatgggactctttgacagtctggcacagcctatggacctcttcttacagtaatgttttaaaacgtgtaaataagaccaaggattgggccaggcacggtggctcacgcctgtaattccagcacgttgggaggctgaggagggtggttcacaaggtcaggagattgagaccatcctggctaacacggtgaaacaccgtctctactaaaaatacaaaaaaaaattagccaggcgtggtgtcgggcgcctgtagtcccagctgctcaggaggctgaggcaggagaatggcgtgaacccgggagacggagcttgcagtgagccgagatcttgccactgcactccagcctgggcgacagagcgagactccattaagaaaaaaaaaaaaaaaagaccaaggattacaaaagaagtcaattaaattgaaatacagttatcaaacacttaaaaaagcaaattcgtgatatagaatatatatagatatgctttttttttttttttctgagacaggatcttgctccatcacctaggctggagtgcagtggtgcaatatcggctcactgcagcctctgtcccccaggttcaagtgagtctcatgcctcagcctcctgagtagctgggattacaggcttgtaccaccacgcccggctaatttttgtatttttagtagagacggggtttcaccatgttggccaggcggtctcgaactccagacgtcaagtgatccacccacctcagcctcccaaagtgtcgggattacaggcgtgagccactgcgcccagctatatagaaatgctttctactacattgttataagtgggtctgactactgtaatgttcatgagtgatgagtgtaaatgatacctcacgatatatacaatgactgtaatgtgatcatgagagtatctgtgatttctgtgcattacagaggcacagacacagtgacttgaggaaatgccaagttaaaactccttgaggtgaagactgacccctttgagagggagccccactctggggccgggtcacccaggtctgggcctcttgacattgagaggtgtgagcctcttcactagcaccagggtaggatgctgacagggtctgaccttccctctctctcctacagatgggcggacaatttcatggccgagggctgtggagggagcaaggagcacagcttccagcatcccttcctccaggtatctggccctgtccctcctacctcctgtctcccgggcctcagaccaggcgccacccccggccatgaggccaggctgtttcctgacttaggagtggaggtgtctcctgctcccagaagagccatccacttctctctttccctccccagagcagaatccaaggtttagaatagggcaaagagcaccatcctctgcgaaagtcctggcaagtggtcatgtcctcaccacatccaagtcaggacacgtggaaaacatcagccctagtgacaaaagtcagctctctatccactgggagcccagaccccaattgggacagggcagacaccataaatggaagacactgttcgttgaactgagaatcaggagactcaaatgtcagccccagctctaccagcaacttgctttgtggccttacataagtctttgagcctctcttgggtctaggcttctccacctgcgatttgactaggggttggcctagatggatggttttcagacagggctctgcacagccttagggttcatcaggatgtatgggggctttggggcagacctaggaggctgtctctagcctccatggcagctctgcatttgtctattttacatattggggttctgggtaagctcttgtttgacaaaagtttgcattaaaaaaaatagttaaagatgatccccgagatcccttccagctctgaagtcctcgggttttcatccctgcaggcagtgggcatgttcctgggagaattctcctgcctggctgccttctacctcctccgatgcagagctgcagggcaatcagactccagcgtagacccccagcagcccttcaaccctcttcttttcctgcccccagcgctctgtgacatgacagggaccagcctcatgtatgtgggtgagtaaccaggccaggctgagaagggctcaggggaagctgtggctgaaggggctactggtgaaacagccctatcccacccacctccacttcatcccaccattcccccagacttcacacgcacaggcacacaggcaggactgatcgagcgcttactatgagcttggcatgtctatcaccaaagaccccttagtgacagatggccttcgccttgggaagctaactgtaatttgtttctcctttcctagctctgaacatgaccagtgcctccagcttccagatgctgcggggtgcagtgatcatattcactggcctgttctcggtggccttcctgggccggaggctggtgctgagccagtggctgggcatcctagccaccatcgcggggctggtggtcgtgggcctggctgacctcctgagcaagcacgacagtcagcacaagctcagcgaagtgatcacaggtgcggccaggggcagggacacggggctgccctatcctgccctgtcctccttgggagcccagcacagactcatacaagctctgccatgtgccatataccaagccctgggtgaggtgggtagctctggaggtgatggatagaatgtagggaagactgcaaagggatgtggctccaccaaggatgagtggcaggccgggcagggcgaggggctggcttgtcctttgatacagatgcagacatgcaaactactggatttgggagtggaaaggaacaggtgcttaccaagtgcccagcctggtgctgagcactgtgtgttcatcatcacagtgactcccacaggccccaaacggatgcatcacagcccattttacaatgaaatgactgtcctgggtcacttagggtcaggatcaaccaagaaatgtctatctcaaagcctgttgcttcttgaaagacctgcgtcataccccgtggggcagctcttagacacaggcaggcctctggggccttagcctggcactgctggcatgcccctcaggaaccagggaatcagggacaggcagtggtgactgtgcctatgaactatagggggccctgcagaggtcaggggctggcatgtttggtcgctgtggccatgctctcctggcccccagccccagtgcagccctgttctcatctgggtccctccttccccacaggggacctgttgatcatcatggcccagatcatcgttgccatccagatggtgctagaggagaagttcgtctacaaacacaatgtgcacccactgcgggcagttggcactgagggtgtgtgtgggcacaggggcctggaaggagtggggtagaagggagcctggggagctgagcacaggacaaggtgccagggttcacttgtggggggtgaacttcctgccccgccttgccttccagatgtgttttgacaagtcttctgacacctgctgtgtcaggaactagaggagaccaaggacagagatgaatgagatgcaagcccttcagaggaggtgaccagcaggaagaaagggcagtcagtgaattcaagtttggaccacttgtgctcaactgatgtctcattggccatgcctatctgagtctctcagggcagggagggtggcattcgagctgcaaatttcaacaggcagtagtaggagcagctccaaacagagcaaaggcacaggggactggatgtgaatttgaaaaccagtgaggaataattttgagtgtggccaggtgcggtggctcatacctgtaatcccagcacttttgagagaccaaagcgggtggatcacttgaggtcaggagtttgaaaccagcctgcccaacatggcaaaaccgtctctacaaaaaatacaaaaattagctgggcgtggtggcgcatgcctgtagtcccagctactcaggagactgagacaggagaatcgcctgaactgggggagcagaggctgcagcaagccgagattgcgccaccgcactccagcctgggcaacagaacgagactccatctcaaaaaataataatttgagtgcagtataggtttgatgttggggaaataatcaggaattaagtaggtcagggtcatgtcattagagaactttaccatcaggcaagtagatttagactttaaatgacggaggaatcactgaaagtttttgagcagggaagtaagtatcaaaattatgagattagcaagatacagctgcgctttcaaagaatgtcctgggggctagtgcctgttggggagcagctcttgtctggcccccggtgagctaagggacttaggcagaatgtgaattagctatatcactgagcatgcagtctatttccactcatttctgttttctagcaagaccttaatgagtgaagcagtgcatggacttaccttctggcgcaagctccttgtcacagaccagtaacacactgaactagaaagctgtgtttttccaaacttgtgaaaataatgtagtcagttgcagctggcagttctttttttaaatgaatagaatttttaaatatcagagcattgtatactgtaagggtaatgtttttatgagtgtgtgtgtgtgtgtgtgtccatgaacctgtgcacacgtgtactgggtcacaatataaaatgtatttcttactcttgatccagtcaaaaaaaccctgagtaaaagtggagaagggacagctagaacccatctaataggccacaagctcctgatgagagactgagggacgtgaaaggagggagctggcatgaggaccactgggagggaatgacccgagatcagaggaggctaagccggtgggctgtgctgggggtctgggggaaggtggagagtgtaactgtttcctctactccccaggcctctttggctttgtgatcctctccctgctgctggtgcccatgtactacatccccgccggctccttcagcggaaaccctcgtgggacactggaggatgcattggacgccttctgccaggtgggccagcagccgctcattgccgtggcactgctgggcaacatcagcagcattgccttcttcaacttcgcaggcatcagcgtcaccaaggaactgagcgccaccacccgcatggtgttggacagcttgcgcaccgttgtcatctgggcactgagcctggcactgggctgggaggccttccatgcactgcagatccttggcttcctcatactccttataggcactgccctctacaatgggctacaccgtccgctgctgggccgcctgtccaggggccggcccctggcagaggagagcgagcaggagagactgctgggtggcacccgcactcccatcaatgatgccagctgaggttccctggaggcttctactgccacccgggtgctccttctccctgagactgaggccacacaggctggtgggccccgaatgccctatccccaaggcctcaccctgtcccctccctgcagaacccccagggcagctgctgccacagaagataacaacacccaagtcctctttttctcactaccacctgcagggtggtgtta

SEQ ID NO: 2060 - protein, 407 aa, Homo sapiens
MAWTKYQLFLAGLMLVTGSINTLSAKWADNFMAEGCGGSKEHSFQHPFLQAVGMFLGEFSCLAAFYLLRCRAAGQSDSSVDPQQPFNPLLFLPPALCDMTGTSLMYVALNMTSASSFQMLRGAVIIFTGLFSVAFLGRRLVLSQWLGILATIAGLVVVGLADLLSKHDSQHKLSEVITGAARGRDTGLPYPALSSLGAQHRLIQALPCAIYQALGDLLIIMAQIIVAIQMVLEEKFVYKHNVHPLRAVGTEGLFGFVILSLLLVPMYYIPAGSFSGNPRGTLEDALDAFCQVGQQPLIAVALLGNISSIAFFNFAGISVTKELSATTRMVLDSLRTVVIWALSLALGWEAFHALQILGFLILLIGTALYNGLHRPLLGRLSRGRPLAEESEQERLLGGTRTPINDAS

SEQ ID NO: 2061 - DNA, 1311 bp, Homo sapiens
  source (1)..(1311)
  CDS (201)..(311)
  CDS (360)..(605)
  CDS (635)..(1111)
  modified_base (1)..(10): a, t, c, g, unknown or other
nnnnnnnnnncacggggtggcgggtcctgggagggagaagcccagacccagtggacactgacattgtctctcgctgttcccagccttttccaggcgtgtgacttaatccgtttccacagccagaccttttctccgtgagttcctcagccaggactgctgccatgccggtgactgttacccacccaaccgtcacgaccaccatgcggtcccccaccgtcgtagggtcctctagggccctgatccagcccctgggcctcctccgcctgctgcagctggtgtccacctgcgtggccttgtcactggtggccagcgtgggcgcctggaaggggcctatgggtaactggtccatgttcacctagtgtttctgctttgccatgaccctggtcatcctcctcgtggagctgggcggctcccaggcccgcttccccttgttttggcgcaacttccccatcacctttgcctgctatgcggccctcttgtgcctctcggcctccatcatctaccccaccacctacttgcagttcctgtcccacggccgttcccgcgaccacgccatcgccgccatcgtcttctctggcatcgcctgtgtggcttacgccaccgaagtaacctggacccggcccggcccggcgagatcactgactacatggcctccgagctggggctgctgaaggtgctggagaccttcgtggcctgcctcatcttcgtgttcatcaatagcccctacgtgtaccacaaccggccggccctggagtggtgggtggcggtgtacgccctctgcttcgtcctggcggccctcactatcctgctgagcctggggcactgcaccaacatgctgcccatccgcttccccagtttcctgttggggctggccttgctgtccgtcctcctctatgccactgcccttgtcctctggcccctctaccagttcaacgagaagtatggtgtccagccctggcagacgagagatgtgagctgcagcgacagaaacccctaccttgtgtgtatctgggaccgccgactggctgtgaccaacctgacggccgtcaacttgctggcctatgtgggcgacctggtgtactctgcccacctggtttttgtcaaggtctaagactcccaaagggccccgtttgcctctccaacctcttcatcctgcccccgctgagttttctttattgagtattcatttcctgggttttcctcttccctatctcccctcctccccttttctttccttcccaattcatcgcactttcccagttctctgatgtatgttcttccctttcctctgctgtttccttcttgttttgt

SEQ ID NO: 2062 - protein, 277 aa, Homo sapiens
MRSPTVVGSSRALIQPLGLLRLLQLVSTCVALSLVASCFCFAMTLVILLVELGGSQARFPLFWRNFPITFACYAALLCLSASIIYPTTYLQFLSHGRSRDHAIAAIVFSGIACVAYATEITDYMASELGLLKVLETFVACLIFVFINSPYVYHNRPALEWWVAVYALCFVLAALTILLSLGHCTNMLPIRFPSFLLGLALLSVLLYATALVLWPLYQFNEKYGVQPWQTRDVSCSDRNPYLVCIWDRRLAVTNLTAVNLLAYVGDLVYSAHLVFVKV

SEQ ID NO: 2063 - DNA, 25001 bp, Homo sapiens
  source (1)..(25001)
  CDS (201)..(292)
  CDS (1152)..(1437)
  CDS (3896)..(4096)
  CDS (8217)..(8330)
  CDS (9868)..(10029)
  CDS (10706)..(10950)
  CDS (12111)..(12183)
  CDS (15555)..(15623)
  CDS (16337)..(16474)
  CDS (18436)..(18602)
  CDS (24636)..(24801)
tgggtcaagatggaattccttagccacccagcgtcagcaggcctgggagtgagcaacgtagcagttcaggaagaagagagagggcagcaggcctccaaagcctgacttcctatgggtggccacatcccaggggagcctggccctgtgaatgaggagcaaaggaaggacagactgcagaacgggggagcagaagggtccacatggaaaggagagacgggcaacagtggttccttgaaactctccctgtagaccgtcatgtgatccacatgcagttagggacactgaggccagggtagggaagtacccagcaaggaatgcagagagagccgctgagagcagcacctttgggttcccgattctgcttcaggacctggactttggtttaactttcctcaacttgcatttggcagattagaaaagataccaaagcaacaagttatttcaggcctagctgacctttaataaaaagcacatatgggctgggtgcagtgactcatgcctgtaatcccagcactttgggaggctgagataggcagatcacttgaggtcaggagttcaagaccagcctggccaacatggtgaaaccttatctctactaaaaatacaaaaaattaaccaggcatggtggcacacatctgtagtcccagctactcgggagggtgagacacgagaatcacttgaacctgggaggtagagattgcagtgagctaagatcacgccactgcactccagcctgggcaaaaaaagaggctggaagggaagggacgtatctgtggaggtgaacagggcagggaagttcatggtgtagagctgggaagtttataggctctgggccagcctttctgggatgggatcatggctccgagtatgaactgtgtgaccttggatgaattacataacctctctgggcctcagttacctcatctgtaaagtgggcatacttggtgaagatctgggaattaaacaaatgaatatatgtaaaggcttggcatagggcatggcatagagtaagttctttgaacatttttaagtctaaaagcccagtggccggtgaagattcacaaggcacgttatcctccagtttgtcttagcactttgtcttggctccagattccttatttcagtttttaaaaccagctgttcgtggtcaggcaggtgctgtcctggcccagctggtctgtcagagctgtggcccaggctctgtcccaccagcccttccctaactggggcaaagtgaggaaggtggagagggagctgccctcacaatggaagccaggccttggctctaaggaactggaaggagatgggaaggggttgggaatgcagctcccagccccacagctgctgaccctgccccgtgtcatgtgctcatccacagtgaatacaaccgtgttcaatgcttcagccccattggcaccagacaccaacgcttctctggtaagtcctttcctcttatgttagacatttgagtgcttttgtttgtaggaggagggagaaaagattttggaaatgagaccaacttatggcctcccagacttgcagaggtcaactccagctgcacgtcagggtcacctgcagagctttgtaaatgaacacttttttcttaggtatatactgtaaacatcccacttaaaaacatgcctcattctgttaaatccatgtttttttgtgcgttttttttttttttttgagacagggtctcactgtgttgcccaggctggagagcagtggcgtgatcttggctcaccgcaacctccatctcccaggttcaagcaattctcctgccacagcctcctgagtagctgggattacaggcacgcaccatcacgcccagctaattttttgtatttttagtagagacggggtttcaccatgttggccaagctggttttgaactcctgacttcaagtgatctgccggcctcggcctcccaaagtgctgggattacaggcgtgagccaccgcgcctggccccctcatgtgtattaataatatgatacgagctgggtgtagtggtacacacctgtaatcccagctactcaagaggctgaggcacaagaattgtttgaacccaggaggcagaggttgtggtgagccaagatcgcaccactgcactccagcctcggtgacagagcgagaccctgtctcaataataataataataataataataataataatatgacacgcacacaaaggaaggggaagtagagatgagggatggtaaatagagcctcacaaagctgtaagcaaagcctgccattcatttttctgccttcttccttctctttctgcctaggacccccaatttctagcagtgccactctccagccccagagagtttattagtgtttcttcctcaatgaatctaatgtgtcctttgcacaccttagtctctggggcctaaggtatggtctgcctttcccagtaatgacagtggtcttcaggagccagcatcccagcctaagtggcttaatgatagaagttcaattccagatgaaggtagcacctggtaggacttgggggacatttgtgagcttttactgtctccaaggttgcttcttaagttattcctgcctaggcaattgactgctctgcctacacacatcctagttggcaatttaacttaatatttttcaaagattagggtttttttttttttgagatggggtcttgctctgttacccaggctggaatgtagtggtgtgatcgtatcatcactgcagcctcaaattcctgagctcaagtgatcttcctgcctcagcctctcgagtagctgggactacaggcatcagccactgtgcctggctaatttttaagttttttgtagagacaaggtctcactatgttgcccaggctggccaagtatcaaattttgagagagaaagaacagaatcagtcagtgcctatttctgaatccctattatatgcaaggggccatgtgcactgaaggctaaaaaagacatctaagaaaccaacacagaacctgtcctcaaatttgtttttaatatatttgtagagaagaacctgaaaagttatgggacagcataagcagaatgtaccatgcattaaatataggccaaatgtgtacatcaatcttgaaggcaggaaaggaggctgctggagaggccaagaaaagcctcaaagaggaagtagaatgcgatctggtcttcaaggttgggaaaaagttggctcagcagagaaaagcacattccagactgaaggaacagcatagacagaagggcaagagaggaaaagcacaaaacctgtgcagaggctattgggtgggctaggccagctaagatggggtgagggtggggcttggaacactgtctcacagtacacatcagagtgtgtctcacagtacacatttatatatatatatatataaatttatatatgtatatataaataaatttatatataaaaattcactgttgtgtatgccttggattttaggcatctgagacaccaaggtggggaatggctgaaatgacccaagaggggactgacaagggaggtgatcccccatatatgaaagggtgtgacagaggggatggaggggagagaataaagatgagacactccaggaaggaggcgtccacaggacctgtggttggttgatgggagccaggcatcctgcctctgcacttttcctacttgctagcacagcagtgcatcctagaacacaatgaagaaacacatgtgagctcctaatcttcctagggagcttgtcattccttgaaccagcccgtccccaggaacatcactctggggggctggggtccctcagagggtgggaaggtatgctggctgcctggggactgcagtgggaaggacacagctgactcatcaggaagatgctgacccattctctcctgtgcttggtctccaagtacaacctccttaacctcacagcgttggactggtccctgctgagcaagaaggagtgtctgagctacggcgggcgcctgcttgggaattcctgcaagtttatcccagacctggcgctcatgtccttcatccttttctttgggacatactccatgaccctgaccctgaagaagttcaaattcagccgctattttcctaccaaggtaagctcaccctgcagttaggaggggacctgcagtcagacagctgctgagtcccccagagagggttctggtccaccgacaggatggactccatgcgagcactggcccactggggtttttcaagttaagtcagagagaactgtgttcccttgttggctggtccccttgacaacacttggtattgtcaggcttttatctttagtctttgtctatagtagtatctcattgtgttttttaaatttttcatttccctgatgactaatgaagttgaaaatacagctattcctgtgtttattggccacatgcccaattgcctttctttttggaagtgtctgttgaaatctcttgcacattttgggttgtctgcctttctgatttgcaagagtttgttatatattctgggtagaaatgtttttgtgattatatgtgttgcaaaatcttctcccactctgtgactgtttttttctttttacatccttaatggcatcttttgattaacagaaattcttagttttattgtaattgaatatatcaaactttcctcaaggcaaatattggacagcagatattcttgtatgttaccttctaaaagcttcattgtttttcctttcatgttagatctacaatccatcagaattgattctgatgtgtactgtgagacagtgtttctttgtgattttatatagtcaattgttccagtattttttaaagactattctttctccattgctttgcaatacttcctttgccatatatcaaatattcctatatgacagggtctgtttctgggttctttattctgtttcactagtttatttatatatcagtatcacagtcttcatttctgtagcttataagtctttatatctttgtctcccaagctctccccttttgtcctttttatataatattttcttggccctttgcatttccacatgaattttagaatcatcttaaatttcaccaaaatgaaaacttgttggaattttgatgggattatctttgcctctgtttgggaagaattaacgtctttcaaattttgagtttttctgatttatgaatacagtatacttcatttattttggtcttctttctctccataatgttttatacattttgatctttaagtcttgaacattttttgttagagttattcctaggtacttgatttttttataccgtcgtaaatgctaactgctatgttattattattttattattattattatttttgagacagagtctcactctgtcacccaggtgggagtgaaatggcatgatctcggctcactgcaacctccgcctcccgggttcaagtgattctcctgcctcagcctcccaaatagctgggactacaggcgcctgccaccacacccggctaatttttgtaattttagttgagacggggtttcaccatgctggccaggctggtcttgaactccttacctcaggtgatccccccacctcagcctcccaaagtgctgggattacaggtgtgagccaccgcacccagccctaactgctgttttaaattttattttctacctgtttgtggctggaataaaagatttatgaaaacagcacttgcatacataagcagtaactgtgccgtggggtggggggtactcggaagaatttaagcaactctttcccaccgtaaactccattagcagtctcctaaagccatcttaactaagtattacagctgctactgctactaatcataatgataaaatctttgaaataaatagttgaatttttcccagattttctaaagactaaataaaaggtgctttaggaagcttcacagtatataaactgagtaaaaaaatagtttgcttacaacacaaatgcaccatcaagacaagttctcttccttcctgcccacttccagtccagagcacatccctcaatctcctcttatgtaaaaattctcaagcagtcactgtatctgagagtatctatctgttgcctacaggatgaaaagtaattcatgtggcatgaaattcttgtgccaacaacattttttccgtcacattacttaaaaattgctcagttgggccaggcacagtggctcacgcctgtaatcccagcactttgggaggcccaggcaggcggatcacgaaggcaggagatcgagaccatcctggctaacatggtgaatccccgtctctactaaaaatacaaaaaattggccgggcgttgtggtgggcgcctgtagtcccagctacttgggaggctgaggcaggagaatggcatgaacccgggaggcagagcttgccgtgagcaaagattgcgccactgcactccagcctgggcgacagagagagactctgtctcaaaaaaaaaaaaaaaaattgctcagttgccttctggaatttccggttgcagagaggaatgaggccacaccattttatactcatcagattggtagacagatgaaggtcttgggacaccagatgttggagatggaaagcagtaggtgggaatgtagacagatacatccaatttggagagcaactgacactctctgattaggttggaccatatgaagttgcccatatttgactgtttcaacctacaaaaaaagtcaagttcatgtggtttaacttaataagcattcatatggttttgatgtatatgctaggaatattatagaaaaggaagtataaacccagcacactacttggttctgctgtgactaatatttatatgatcatgataatataaagctgttactaattttcaacttttggaattgacttacagataaaacacacaagccatgtgtttacggaacaagaaatgattgttctcagcttcgacaatggaaaggtcaaagtggaggtgtgacaggaaggaagaggggaggaggagagaggtggtaggaggatagaggcagtggtcctcaccttgcaagatggagaatgagagatattagccaaagctaatggaaggagatgtttaattattatcacttgaaagtacaaaggaaacccataggagcttaaaattaactatcaaagattaggaataaggaaaggacaggaggcacagtgtaagtaaaggtaaattcttatcaatagataatcccttaaattagtaaatgaaaatattaaagtatatgcatattagttaatgacatggagggaacctctggaacaagtaaaatcaagcagacatagtggatagatctggaaggcggggctggattgagaaaaggggaggtgggagactttgcttttcctcataagtattttccactatgtgggtttttaaccaattacatatgttatgttaataacaaatttaaagagaaaagggggatgcagggaatgaagtcaatgtactgtcacctgcccctgcccttcaaattgccttctttgaaaagatattaaaaaggccacagggtagacgttgggggaccatctgtcctgagacttctggacatagagttggtttggaggggaggtcggaggacattgattcagaatgggcaggaaggtcaggttcagaacttggtctaggaagggcctccaggttcagaacctggcctaggaagggcctcttgagaaacagcggaacaagagactcttggtggacaaaaggtctgagtgtagccaatgatccccagtggaattggggagcctccctcctagcccaggtggggtacaacaacctgtcacaggcttgtaggaactaaggtttgcttcagagtccagcccttgccctcatcatacctgctgggtgccccagttcagactgtcataccagaacacatcttcagcagtggctgccatggccatatggatcataacagatcccacattgaccaccatatgccaagcactctaaatgtgtcacagttcacttacacctttgagggagatactaccatcatctccattttacagagaaggaaattgagtcttggagagatgacacgcttccccaagctcacacagttagcaaggagcagagcctggatttgagcctagttctgctgccttcagagcccagactgtaatagttcacctctttgctgccggaggactggggctgcctggagctgggtgggtgctttactcacttcttttacttgctcatctcctgtctgcaggtccgggccctggtggctgacttttccattgttttctccatcctgatgttctgtggaatcgatgcctgttttggcctagaaactcccaagctgcatgtgcccagtgtcatcaaggtttgcccctttccctcgctctgggcatccagtctgcctgcctaccagctgcagattctttcccctctgtgctgatcaaactctcttctcctcttggccaagagaccattttagttctctgtgtgccacctttcctgaacacaggctcccaggagccagtcctttgaggtagggcggggaggggtaacatattcaccaggaaatcctgatctatagtcacgaggtgaggaaggcactggaattcaccctccaacccagcagaagcctcttgattcctatttgagtgtctccagttccctgacctctagcaatctataagctgggccaaatgggatccattgaaactgatcccttagaacagtgattctcaaagtgtggtcctcagaccaatatcatggcatcacagtcacagggaactcgttggaaatgcaatttctcggccccacctgtggaatcagaaaagctggggggtgggaccagcaatctgcattttaacaagcccttcaggtgacttggagtatgctcaagtttgagaaccactgcttagaaattacccactagttagaactggtgacatatgcttgtagctaaacccagccctactccctcataagagcaccaaccggccaggtgcggtggctcacgcctataatcccagaactttgggaggccgaggtgggcggatcatgaggtgaggagattgagaccatcttgggtaacggtgaaaccccatctctactacagatactaaaaaattagccgggcgtggtggcgggcgcttgtagtcccagctactcgggaggctgaggcaggagaatggcgtgaatccgggaggcagagcttgcagtgagcggagatcacgccactgcactgcagcctgggtaacataacaagactctgtctcaaaaacaaaaaaaaaaagaaagaaagaaagaaaaaaaaaagagcaccaacgatctcaccagagtagggagtccagattctagaacttaccctccctgtctttaaggttttttttgttgttgtttgtttgtttgttttttgagacaaagtctttttatatattctcctcattctgaacatgcaggactgaactgatgttcagcattttacagacaattctataatgctcccagacaggtgactcaggagaggcagaagcagctggccctgggcccacccatttctttattcttttctgctgggcctcattcctgctgtttgttatttgcagcaggtgactgtgctctctctcctggctgccctctgaccttcacctccatgtttcctgacaaaccccagggctgttgcagcaaattaccttcttagttttacagacactgtctgcatgcatgctccttcccatgtctgaatttagtctaaagttgcagctacctaaggtgtttaagggaaaagattgcacttgaaaagtacccaaagtcagggaaagttgaggaggtgggacagcaggccaggcgacaagtgccctgggacaagggagagaggaaagggcccctctctgtttgctcccactcagccaacgcggcctgaccgaggctggttcgtggccccctttgggaagaacccgtggtgggtatacccagcaagcatcctgcccgccctgctggtgaccatcctgatcttcatggaccagcagatcactgccgtcattgtcaaccggaaggagaacaaactgaaggtaaggccggtactaggagcagaggcataacctctttcttcccacaaagtcagaaagagcgaaggaaggacatgatgcttctttcagtactttgggccaggaaaatatgaggacagagactagagttcccacttggtgtgttgagggggaaatgtgacctccagatgtgggtaaggccaccagggctggagtgactttctgaggaccaggaccaaactaggctgggccactgggcacaggctctctgtctttcccaaagtgacctcgagttcttatgagaatcagcagatcctgacaggggctcagcctagaacactgaggcagaggaacttccttagccttcctggtctctgcaactccccacccagcctgtgagcctgagaagactcgggtcaccccctcccccatccaggtctggaccactttaggtgtggcctgtcccagctggggcccctcaggaaccgcaaagaccctgtggccaccttctgggcccttctccccagagacccaaacccagggcctctccaagcttgaacatccctctcttctatgacccataccccttaggcagttcaccctttcagaacacacccacctgtgcaatccttgcaaggagcacctcaggccccttcagtatcttctggaaggcagggggtccttgaaccatgttccacagaatggttgcatccaggaggaactggctccccagaaacttctccctcccccaaccccgctcctgcagaaggctgccggctaccatctggacctgttctgggtgggcatcctcatggctttgtgctcctttatggggctcccctggtacgtggctgccacggtcatctccatcgcccacatcgacagcctcaagatggagacagagaccagtgcccctggggagcagccccagtttctgggagtcaggtaggaggggtcagggcctagggatcacccaatggggaggggcccactcggggaggagaagctggctttgcctgccacaaaaggatttggacaaaaagggcccccgctctgacggcccaagaaccacagggacaggagtgctatccctggagggagggaaggagagagacagaagtccagctctaagtggggctttttacctactgggctccaagcagtatgcataccccatccataaatatgcacacgtgccagacactcatcttcatcagccacccaaggtccccacaaggcttcgtgctgtcctgcccttttcctcttcctcaagaccctccaggcccctactgccctgatggccctcctgcgggttcaggtcctgctcagtctctattcctccagaaggctgtcctgggatcacccccgctccccagtctgtggccctgcctgttactcctgttccttcacttgcctcttctctcacgccccatggtaggcagagaagtacatcttcagccccttagggcctccagggcgagaccacaccaaaccctggctttctcctacgtggctgccctaagaacttctcccactatcttgagatacttggaccgcccagcctgcccgaatgaggcttctctgcccgactgcagggctcacctgcctcccacccctgacacctgctctgctggtgtcctcttccccagatcctcattcattgtgccccacaaaaacgaaatcttaaaatcaaagggcagagtaatagcattttatctcgcatgtatcctcacaataggtgccattattatctgcatatactgaggctcaagatgggcaggctcctgcccaatgccacataactagcaagtggcagagccaggatccagtccacatcagtcctgctcaagccccccagctacaagccactacactaagcggcctccctcaatgctcctgcaagatgcccttgccccagtcaggggccgcctgtcttcccacatatggttcagctgggcctcaggcaaccaggcagagcttcatgcagaagccctcaaggccatggccttggacacaagcttcaggtgcccacagaggggcaggagggccagagtagttgccaggcatttcctggtacaccctgaccatgtgttcttctctgccagggaacagagagtaaccggcatcatcgtcttcatcctgacgggaatctctgtcttcctggctcccatcctaaaggtgaggtcctgcactgtcacctagggcctcgttgcctgagaaagcagagcggatgccttaggcagggagggggtccccacatggctagggatcactggcctatcagccccctaagaaaggcacagtcttagccgggcatggtggctcacacctataatcccagcactttgggaggccgaggcaggcggatcacctgaggtcaggagttcaagaccagcctgaccaacatggtgaaaccctgtctctactaaaaatacaaaacttaaccaggcatggtggcacgtgcctgtaatcacagctactcgggaggctgagacaggagaatggcttgaacccgggaggtggaggttgcagtgagccaagatcgcaccactgcactccagcctgggcagcaagagcgaaactccgtctcaaaacaaaaaaaagaaagaaaagaaaaagaaaggcacagtcttactaggccaaagcaatgtttccacactgtcaccgccgttttctgtgatactgcagttttttatcatcaccaatcctctctcccacccatcccagggccactctcacctttctggaggatactcttccctctgaaagttctgccaagttgtagccctgcttagatcaggaacttcctgaatggggtgtgtttccacattgccagggtttggggctcatgaagtttaaaacttgcagcaggaggccaaacatggtggtacatccctgtagtccggctactcaggaggctgaggcgggaggatcacctgagctcaggaagtctggggactcgagtgactttttcccacacagcttgaagctcctcttgcttatgtcccaccacaacagctaagagactaagtcaagtaggggtacaatggaggcaggcgtcccccacaagggtctctttctggagagactccagaaagcaaggtgttcccaccaggcttccctgctctccactccagccaatcgcccatcactctccctttcccttgatcagtgcccacgtaagactttcctttcttgaattaagtttacctgtaattgcctcaaccttttgccgatattatttttcctctttgaatatctcaaaacagctcatgaccaggcatggtggctcatgcctgtaatcccaggactttgggaggccgaggtgggaggatcacttgagaccagcctgggcaacatagcaagacccccatctctacaaaaaatacaaaaattagccaggcacgatggtacatgtgaggcatgatcacttgagtccaggaggtcgaggctgcagtgagccatgatcatgccactgcactccagcctgggcaacagagtgagacctcttctcaaaaaaaaaaaaaaaaaacctcattcagaggtgaccttgtaagaaacaaacgctaaagaatgatgattctggctgatgtatttacaatggaaaatatttctggcttgagaattggtgctgggcatacccgagcagtaagtaggaggctggcattttttaagggatatttcccttgtgggggaaacaaattacacacaggagggcaagcattttgtttattgaaaaatatattttaaatggccagggactacttacttttgtagagagggttctaaggtgccattgtgtatgtcaattttgacactgtttaacatacaagtatttgcattaaaaagctcgaatcaggctgggtgtggtggctcaagcctgtaatcccagcactttgggaggccgaggcaggtggatcacctaaggtcaggagttcaagaccagcctggccaacatggtgaaacccgaaaccctgtgtctactaaaaatacaaaaatagccaggtatggtggcacatgcctgtagtcccagctactcaggaggctgagacgggagaattggttgagcccgggaggtggaggctgcagtgagccgagattgcaccactgcactccagcctgggcaagacagagtgagactccgtgccccccccaaaaaaaaaaaacaccttcgaatcggccaggcatggtggcccatgtctgtaatcctaacactttgggaggccgaggtgggaggatcacttgagaacaatagtttgagaccagaatggccaacatatcgagactctgtctcaagaaaaaaaaaaaaaaaaaaaaaaaagctcaaatctaagaacagacttctttaggggcaaaaaattcctctaaagccctcctagtgttggcatagtgctctgtgctctccggagtgctctaacatgaccacaaggaggaacagcctctgctcaccatggggagccacagctgcaggtgaaagagagaaggtaaggggcagaaacagctgagagagacagcggaagaatgctttgaaaggctgtgaagatttggaatcattcttgtagagtgggatgaattctatgatcccatttttgaaaaagcaaacaaattgcctgtgtgcaagtttggagggaaggatacccgccaaactattggtggttagttggtgatgagtgctgattagtttacacacttttgttctgcttcttttgtatgtgattgcgtatgaggcatgatttctgtttttttttggtttttttggtggggccgggggggtttgtttgtttgctttgtttggtttttttgagacagagtctctttcgcccaggctggagttcagtagcacgatctcagctcaccgcaacctccatctcccggattcaagcgattcttctgcctcagcatcctgagttgctgggattacaggcatgtgccaccacgcctggctaatttttttgtatttttagtagagacggggtttcaccatgttggccaggctggtctcaaactcctgacctcaggtcatccacctgccttggcctcccaaagtgctaggactacaggtgtgagccaccacacccggccggatgcgtgatttctgttaagtgtcccgggtactcgctgctgatgtagatcagctcattaaaagtccccatgcccctgcaggctgagcagttttaggggaccctcagctgaggctggaggtaggaagaagctgggcaggaatgaggagggggcagtctgtggagtcttctcactttccagaaggcatttctttagccagaccacatggcctccgcacggtgcagtgaggggccaggccaggagagcagctgcatgctgggccagctaccccagccagagaaggggcagtacagccccagtgaccctcatcttcacccctgcccacatcccagttctgctgactctctgttcccccaaatatccagtttcctagctgcctctgtggtcaggagccactgtcatccagaacagggtggccaagggccgccccaggcagaggccgatccaaagctctgctctcattttagtgtatccccctgccggtgctgtacggagtcttcctctacatgggcgtggcctccctgaatggcatccaggtaaggctttccctccagatcccttcatgatctggagtcaacattccatgtctggttccatgtcaccaagacccccaattcagttgtcccaattgtccccaattgtcctaattcaatgaaagaataatagtaataatgatactaccacttactgatgctatcaggcaaaataaatatgttaggcacttcataggcctcatataattgaatctatgtaattaggtcctctgatccccattttacagatggggaccggagggtcagaattcaaaatccagaagaagctgactccagtgagcatttcactgtacctctctctcttccctaaggcagctatgcagaagaaaacatttttgttttgttctgtatttactgtgaaatcccagaattcttaaacagtttgtgttacaattaacttgcactttccctgaatatggacaatgtccattttgtggccagctccagggctcctcccctcacccagggctcaggaccctttctctaagaccccattatgcatccgcctagacacctccagcccccctcccgtgcatccttaaggcctgagcagggggcttcccctctctgagaccccacccaggcaccccttcccctagtcccaggacccagcgggccctcggggtctggctgcctggctgagcccccgctgtccccctagttctgggaacgctgcaagctcttcctgatgccagccaagcaccagccggaccatgccttcctgcggcacgtgcgtgcgccggatccacctcttcaccctggtgcagatcctctgcctggcggtgctctggatcctcaaatccacggtggctgccatcatcttcccggtcatggtaaagtgggcacgggcttccccctcctgcctggcaggttggcctgggcaacccagaggtgcagcgcaacctcccctcctgccaccttctgccttcctgtcagctgtggcctggctccctcgggtcacggaggctggcacagaatgacctgatttgagttgtgagtccaggccagatggtgtggggtggggcagagaggaggcggaggaaggaatgtcagagccgctcagtgagaacccaggagccaccctacctcctggctccagggagggacggagaaagaaaatcagttcaaccaggagaccgagttcccactgccaaaattccaaccagtctcagaagtcgatgcgtactaaatatagatctttccaccattcaagatagctaaatttaaaaagctaaatagtgaagtaggggggcaggggaagaacgagggtcagagatcaagaacaacaaaacccaatgatggtatatataaagcttgagcaagggaaaggttacaggtctttcactattcttgcaaatattgtataagtttgaaattactccaaaataagaagtgaaaagaatgcaaagccaacaacatgttgcatctggccccctagataactcaccgagggcagtgacccaggcccttgccaggagcctggagtgtgtcagcaaatgcctggggaaagcctgagggctctggggtaggggacaaagtaaggacactgaggagaacttgaagtgcacactgctgggaggggtctagtccatggttcttgacccgggctgcccatgaaaatcaacccagatcaacaaatcagaatctctagggaaacccagactttggtatttttatgaggtccacaggtgagcatagacctgcagccagggttgagaacccccactgcagggaaagggagatagatcctccccccagtgccctcaggggcctcagagctggcgaagggaaaggcagtagtagtcatgattagcatttactgagtactgttccactgagtccacaccagcccccaaagcactaataaccccgctttacagatgagaaaatgaggctcagagagcatgagcagagtgaccctggacacacagccagatagggcagggcaagacccacaccctccacctattgatttttttgtttaatttgcatacagtaaaattcaatgtgtgggtctatgagttttggcaaatgtacagagtggttagagacataaattctcaggcattacctgacctgctaaatcagaaactgggggaatccagtgatttgtgtattaattaacaagccctccaggtcctggtgcatgctcaagtttgagagccactaatttatgtatttattttatttgtttgagatggagtcttgctctgtcgcccaggatggaatgcagtggcacaatcttggctcactgcaacctccgcctcccggtttctagcgattcttctgcctcagtctcctgagcagctgggactacaggcacccaccaccatgcctggctaacttttgtacttttagtagggacagggtttcaccatgttggccaggctggtcttaaactcctgacctcaggcgatctgcccacctcggcctcccaaagtgctgggattacaggtgtgagccaccacgcctggctgagaaccactaatttaaagaataactgtagttctccagcccatggcctttctgaggctccccacttcggctgtcacaggctccgtccctcttggtcactggtaggcatggtcactcacctgaggggccagacaagaggaactacggtggagggaaagtgaataatggcttatgggagcttcgagacggctccaaagacaccacaaaaagtccctgaactcagccgactgagggagaaaaaaatctatgcctgagtttgggcattgagaccacagttttctccaaattctcacaaaactttagtctctctccaccacagatcctgggcctcatcatcgttcgaaggcttctggatttcatcttttcccagcacgacctggcctggattgacaacatcctcccagagaaggaaaaaaaggagacagacaagaagaggaagagaaaaaaaggggcccacgaggactgtgatgaggaggtggggaagatgtgaggccggggcacagaggagaaattgagagaccttctctccacttttgccagggacagggagagggcggcttcttgggtggcctgcagcagtgcctcggcccagtccaggatgggctggggcatctgcttgtcttggtctggggtgttgagggctcttctgtttatgtgaatatcctcagggtgggccagagtgaatgagactccctgtccagggaaaaggtgactggccatgcccactctttccatcactgtgggctttacggccgtgatcacagcaagcgggttcctgtgggaagggccaggaggcagctccagcatggaaggaggttatgaagactgacctccaaagagtggagcagacttggggagaggtgtctaatggggccttataagtagactggactccagacaggcaggaggggctgggaacaagttttgcttgcgcctttgcctagggtattgaggacaaagatggggaaagaggcaggtatcctcgccaaaaggagactggctacatttcccagatgtctgggacaacatggttgccccatctgcccctcttctcccatggtcccttcccatttcatccccaaaacactcagggagtcaacagacaaggggccagtccagaaattatagtgaatcacaaaacatgaggcagaaagattcttaattcatgtgttcattacttatgatgaaactgtccccacaaaaggaagtgacttacccaaaatggacatgtagctacatttctaagaaggaattaagaaaataattcctgactttgctggtttctgatatgctaagctgcctgtgccatctcctaatgctgtgcttggttcccaatctcccaatttgacccaaactcacgtccctgcatccaccctgtcctgttctcgtgattttgccttgtgcagatgaaacctgttcaaggcaaatcccttctgactggctggtggtgattaaaccatcttctgatcagtcagaactcccctggtccttaattactgtgctcttccaggaagagtcccataatgcatgtgtttgtagatgatttgtaaaggtgggttctgaaaacaaagaaacagagactaagtgccttttaaagacaaatacttcttttgttgatactttcaataaatatctgagtggctaccacatgccaagaactattacagggttgggaaaaagaatctctgaattatgatatatcaatggaaaaacaggattcaatttatacaaattcattttacttgtcttatagcaacacagttgttgtgtgaggttcattcccaagtgactggttgctgtgacagataaaactgttttgatgagtaacattcctggaagagttccggtctgtctgatggtgtgtataggacagcaggctaactgtgcccattccccttcagtggaccccagggtatttgcagcatcccctaactgtttagaggtgaacagaatggtggtttgcaatgttcatgcatgcattttccatcttggcaagaaagccaagttgttggccacgcgcggtggctcacatctgtaatcccagcactttgggaggccgaggcaggggggatcacaaggtcaggagttcaagaccagcctggccagcatggtgaaaccccatctctactaaaaatacaaaaaattagccaggtatgggggtgcacgcctgtaatcccagctacttgggaggctgaggcaggagaatcacttgaacccaggaggcagaggttacagtgagccgagatcgcaccactgcactccagcctgggcagtagagcgagactctgtctcaaaaaaaaaaaaaaagaaagccaaattgttgtgttggtgtttatcctcttttcccactgtttttctccagccccagttccctcctccctcggttataaagattcccatggaaagtgtccaatcagatccccaaaacggtatccactgcattgccagtaagtaaaacacatgatgtctctcccttcttactactagtcctccatgtctttcccctaggaactttcatctgtaactcagggggatctaatcattttggatgctagagcagcagtccccaacttttttgtcataagggacaagttttgtgcaagatagtttttccacggaccagtagggagtggggaatggttttgggatgagactgttccacctcagattctcttaaggaatacgcaacctagatcctgcatatggacagttcacaatagggttctcacccttatgagaatctattgctgccactgatcccaccggagctggagcacaggggttaatgcttgctcgcccatgctcacctcctgctgtgcggcctggttctgctactgttccatggcctgggagctgaggacccctgcgctagaagacctttgtccttggcagagatcaaagagaactgggccaccaggactggtactccaaccagatggaaaccccagagcaaagcctgcagactcgactaattctcactttagttgaggcaaaatccctcattccctcctttccccaggtgtccccagatccctgtggcatctcctggccctcttctatgttgtttcagaccacatcagtccaaacatggccaccaggcctcccatgttttcagtgctgttgaaaatgttgagggctcagaaccaagcttttccctttagagaaataggtagcatagcacttgggttataagtcaggcataattggaggtcctcgtggtggttgtgctgtgcctctgtgtgaatcctcagcaccttctcagcagacagctgagagggaggctgcctaggagggactgggcattgcttatggaaatcctgggagattatattactgcctttaacccctcccagcctcagctccctataggtggccagtcctgtcatccaggcaacatagcctgtcccgaggtcttctgaaagatccctaccttagtcccgagccccgtgcttctaatacagggcttgccaccctcaaagacagattaggggtgggtagccagggcatccttcccatcagcactgtccatcataggtacctcaagatcttgagtttctcagactcctcccccactcctatttctctcttccctggccctcccatgcctcacaccccctagccctggctgagcaccttctgggtgaaggagtaactaagcccgaagccacacatctctgaggccccgtattcctcttgcatagtgttggctctagggttagagaaggaaaagaaaggaaatggtgggggaagcccggagaaatatggtgctcaaacctgctccacatctgacatttttcattttcctgccaggaaaaagatcttccagttggagttactcactctgattcttccttcagtgacacagaacttgaccgaaggtaaacactgttaggtagactccttgcgtattaggtaagagactaggaaatggccgggaaggtggagggtctaggatttcccaagctagctgtcctctcagtagaaggcccttgctggcccccaactgggagtcaaaggctgacaaacctgactcatcattcagggccaagaaacaagtatgtcttcttactgacttaacaacatggttacaacacacaaaggtattcaactttagtaaaggaaattcttataaaagattaggtagaacaaaaattgaaagtaaacgttgtggcccagcacggtgcctcacacctgtaatcccagcactttcggaggccaaggcgggtggatcacgaggtcaggagatcgagaccatcctggctaacatggtgaaaccccgtctctactaaaaaaatacaaaaaaattagctgggcatggtggtgggggcctgtagtcccagctactagggaggctgaggcaggggaatggcatgaacccaggaggcagagcttgcagtaagccgagatcgcgccactgcactccagcctgggcaacagagtgagactccatctcaaaaaaaaaaaaaaaaagaaaggaaatattgacagaaaacagaagccaggcgcggtggctcacgcctgtagtcccagcactttgggaggctgaggcgggcagatcacaaggtcaggagatggagaccatcctggctaacatggtgaaaccctgtctctactaaaaatacaaaaaattagccgggcatggtggtgggcgcctgtagtcccagctactcgggaggctgaggcaggagaatggcgtgaacctgggaggcggagcttgcagtgagccgagatcacgccactgcactccagcctgggcaacagagcaagactccatctcaaaaaaagaaaaaaaaagaaaacagaaaaactaggcatggcttaagtgtaatatcactgaaagccaggataaatgaacgctaaggatcgaaaccctggggtactctgtagaatgaattaacagcagggttaattagcaaaggtcagaaagggtatggaggaaagccaacatcagagatcaacatcaaagctaacatcagagatcaactggagatgggaactgttaagaataggttcaaggccagttgccaggagcccccatgccaacaatgtgattgttcttcatgagaagccacccgtgaaaaaggtgagactccctgatgatgacatagtgggggcaaacacagaaaagatgaatttagaggcaagaaaggctttacttcattgttacttgggaagatgccaggggcagtcccactcctaccttgtgccctagaatggacagggatcaaacagtaattacagcacaggctatcccaagtctagaagatcaatctccaggcacagagggcactcatccaagagatttttggggaaacggggcaggggatcttctgaattataaggcaaagctgctatcccaatgccagggtgaaacgacacacttttccccagttcaaccctccctaagcagcagtcccaaagatgctctagcccaaagtgtcacctgtcccagttaatctccaccttccttctcatcccacttccccagtcaggctcctatatatgtgatgccattgatctttatacattagtatacaccggtattatgagaaaagcagtctatcttattttcatttataaaataatctacatgaaattgactgactactcccaatttcaggcagtagagagaaaatttggaccaggttaggggtttccaaaaccctgttaaattacacaaggccctaagacagggtcagaaatgaagaaactttggtaactggagatggtatctcccaacctcattggtgttttactgaatttatgaaaacagatggaggcaaagatcactaaatagcaagattctgtttcagtgaaaggctctgcaacatgatctggtttaacaaagactaagcatcaatgatctaccaggtgcgatgcttaatccctgaggatgtggaaagaaaggcatgcaaacaaagacagagcaccctgtgcaagaatatcggagtacacagggagggagtagcctcgttttgagaatctaagaaagggaaactggaatctgccagacatagagcggggcagagaaaagaaaaggcatttcaggcagtggacacaggcccgaagtaccatttgaaaacacacacaaacacacacacacacacacacacacacacacacacacacacacacctccaaagagcaaagaacactgcaatggatggggcaaactaagcaggcaggactacaaacacagaagactgtgtttgtgtttgtgagaagacaagacactcctgtcttctcacactaaggagcttagattctttgaacccaatgaggaatcaccaaatttgtgatttcaaaagttcaccttggcagcaatgtgaagataggtttacagggtgagaccagatgcgtgactatggctgaaggccaagccaataggaaactgctcattctggcatgtgctgagagttcagaagcaaagatggaagtatttgcattagagccctgctctaggggatgggttcaaaacaccaagaactacgtaatccttctttcctacttctcgttcagcatcaccttgcacttcaaaatatcctgtccagcttcacctgctttcagctactcacggaacccagtgttcatggtgccacaggtgaagatagagatggagtcagactatgacttcacagacatggataaataccgaagagaaactgacagtgagaccaccctctaggatgaagcagcttctcccagatgggagatggagagcctggcttagtcttcactgggagggtcttaacttctctgtgcctgtttccttctttatcaaacagagggagtccgtctgcctatagaaaactggagatctattgatgaaaagtattgcttagatgcaaagctctcccctttgtagtaattaaaatacctaaagct

SEQ ID NO: 2064 - protein, 570 aa, Homo sapiens [sequence omitted]

SEQ ID NO: 2065 - DNA, 9417 bp, Homo sapiens
  source (1)..(9417)
  CDS (201)..(299)
  CDS (1862)..(1952)
  CDS (2063)..(2184)
  CDS (2931)..(3162)
  CDS (3237)..(3453)
  CDS (3797)..(3940)
  CDS (4309)..(4485)
  CDS (9145)..(9217)
  modified_base (6)..(105): a, t, c, g, unknown or other
aaaggnnnnnnnnnnnnnnnnnnnnnnnnnnnnnnnnnnnnnnnnnnnnnnnnnnnnnnnnnnnnnnnnnnnnnnnnnnnnnnnnnnnnnnnnnnnnnnnnnnnnctggccaagggccagaaggctgtatcctagactgactctccctgcactcacatatgcgcccccattcaggcctcccatgcctctctccaatgccaatgccatctcctcaggtggagcagagctacctggccctgttctgtacacatgcctcccagctacacgaccacgtccaggacctggtgctagctgtcctggtgagggggcctggggtggtggaggctaggtcacttggggccctgagctggggacatgtgtggtccttgatgtgacacaagggttggggaagggaaagtatcaaggagtggggagcaggaggctgagaacccatgcccagggggcagagcctcatgtgagcagagactggatgctcttggtggctcacaacccactgtcccatcagatttcacttacaaaattgaaatccattataaaattattaagaatctcaagacagcaacagcagagcattgaaccccagaggcagtgccctccagagcatgaggcccagggcggttgcacaggatgagtgccctgccccaccctgcgccctccctctcctcccctccccagaggcagcctctgtcccgaactggctgtgactctcgtgcatgtctttataggcattttaatgcatatgtattcttctctgaatgacaagtagcactgtcctgcttcctatatatacagaggcagggtcttactctgccacccaggctggagtgcaatggtgcaatcacagctcacagcaacctcgacctcccagactcaagcgattctgccacctcagcctccctagtagctgggactgcaggtgcatgcacaccaccacacctggctaatttttgtattttctttggtagatatggggttttgccatgttgcccaggctggtcttgaactcctgggttcaagggatccacctgcctcagcttcccaaagagctggaatgacaggcatgagccaccgtgcctgtccctgcttcctatattaattttttatttttattttttatttttccttttgagatgagagtctcgctctgtcgcttaggctggagtgcagtactgtgatctcggctcactgcaacctccatctccccagttcaagtgattctcctgcctcagcctcctgagtagctaggatgacaggcacccgccaccacacccagctaaatgtttgtatttttagtagagatggggtttcacgatgttggccaggctggtctggaactcctgacctcaaatgatccacccaccttggcctcccaaagtgctaggatgacaggcatgagccaccgcgcccggccctgcttcctccattaatctgagtcaccatgcatctcaccgtgctgtaaccacctgctcctggatctgtcttcctccccacactctgagccctgtggatggacagggctcacttattcatcattggagcctcagggcctggcatgcggaaggcagcagcagtcaatgtttgcttcatagaatgtgggaaggagcactttggctcctggggcatgtgtcctctttgccatgcagggaacacagggtcagcagagggggtgtgtggaaggaccagcccgggcccggagagcatgctgtcctgtggggtgattgggaggtggggacccagcgtcctgggcttgggttgtgcctccctccgctcccactgggaggcagtactgccctgcccctccggtgtcaccacctccaggggttgaagacatcacccatcccagtcctgtcctgtcccacaggcccatctctactgcattgcggctgccgtggttgtagtgacttaccccgtgtgcatcagtttactgtgcctaggggtgaaggagcggccaggtatggggtttggtgaggagggaagcagaagctgggggcagggctctgcttgggggcaggttttgcttttgaactctgcgaagccaaggtgacacgcttctgcgttgcagacccctctgccccagcctcaggcccaggcttgagtttcctggctgggctgagcctcactacccggcacccaccctacctgaagctggtgatctccttcctgttcatctctgctgctgttcaggtacctctggccagctgcccccgacaggcttggtgctggccatgctgaccttgcataggttcagggtgcagtcttggcttgagttttatagggagaaacctgcggctggcacatggctcagaggggctggtgccgggagggagatcccggtagggcttgtgggaatggagggccagggcctgggcactaggaggctgacaatgtctgggcggtttcctctcacattacctgaagtgtagtcaagtccacctgatcacagctgagcaggtgatgagggtggcctaggagtggtgtttgtatctgtgttggggataagtgtcctttgtgggggaagggactgtatgatggtagcagcaagccaaggtcccaatggagatgccagactccagaccctgtccttgcccttgacttctgagctcctgccatgccctgcacatacccacttcctgtccatctcctcaggtggagcagagctacctggtcctgttctgtacacatgcctcccagctacacgaccacgtccagggcctggtactaactgtcctggtgagggggcctggggtggtggaggctaggtcacttggggccctgagctggggacatgtgtggtccttgatgtgacacatatggccagagttctggtggtcaacattttggactttgctttggtcttggtcacctgcattccagcagagggtagaattggggccaggattacaacattcatagccaccggtttgaaccaggggcaaggccaaggtcaggcatccaatctaaaagccaaggccttggggtcccaggcaaaggcgctggcagcacggccctggcgtgacgatgctgtctgctcacaggtctcagccgtgctgagcaccccgctgtgggagtgggttctccagcgctttgggaagaagacgtcagcctttgggatctttgtgagtgaggcgggaatcaaggattgggggtggccggaggggagaggtgagcgaggtgaccttggtgcctgagcctcctggggccagcaggggtggatctgtgttcccttgagtctttagggcctagcacagggcaaggcatgggggtcgtcagtcgagtcgtgtgtgaaggagcaggccccacgaagaagcaggtggcgggacagctggtgtgtgtgtctccccaggcgatggtgccctttgcgatcttgctggctgctgtgcccacagcacctgtggcatatgtcgtggcctttgtatctggcgtgagcattgctgtgtccttgctgctaccctggtaggctgggtgtgggggcctcacgtgtgtccacagtgggtgtcacctccttcatgtaaacctgccgtcccaggccccctgcacccagcctgtgcaggagatggaggccaccagctccatcctcagagccctcctgagaggacatcaggcagtaggaatggcggggggccggcagggggctggcggggggtacgagcacacaggccatctgcttctctggtggccagtctggtcctgggcacagaactcagggatgaatccactttggcctccgtccccagagaattcacaggctgctggtggccaaggggctaggagggctaactccacacccccgccgcaggtccatgctgccagacgtggtggatgactttcagctgcagcaccgtcacgggccaggcctggagaccatcttctactcctcctacgtcttcttcaccaagctgtctggcgcatgtgccctgggcatctccaccctcagtctggagtgagtcccagggttaggatacagcagaggcaccaaggaccagtgggcaggaagagggcaaagcccctcacctaccaagctcagggcatccatgagcctggggcctaagcgctactctttggagagtgtggggaaccacttccccaggtttctctgtgcatgagactgagagggccagctcccctattctcagttccctctaaactctcccaggtcagcctgtcaccttgacactcctctcctgatctgaccaggaaatgaagtccacgtttcaggagggggtggggtggggtgaggtgtcgagtccctccacccagggtgccaggctcagcaggccctgccctaatggctggctgatgtttctccaggttctcggggtataaggcaggggtctgcaagcaagcagaggaggtggtggtcaccctcaaagtcctcattggcgccgtgcccacctgcatgatccttgctgggctctgcatcctcatggtcggctccactccaaagacacccagtcgggacgcctccagccggctgagccttcggaggtaagccccgcacgccccctgcagccagcgaggcacagtgtgggctgctgggggaatgactaacaccagcctgcagacatccctgctgtgtcacacagtcctgcctctgggacctctttccttagctcagggtcacccttttctcctggattttcttctcccactctggccaccccttctcagtcttcttcctttgatcacctggtagactgtggtatgtgagggctcactccttgatctcctattgcttttgctctccaaagcccccttggtacctcttctgctagcctgacccaactcaggcactccttgtgcctggtgactgctagagctgcccctccagcctgtgcttccctcaacttccacagccgcatatcactggcatgtggacatttccacctagtagcccacaagcctggcactcagtctcgatgagcctcaatggaactcatcttgtccccctaactggctcctccttctgtgtccctgtcttggtgaatgacaccatcgttccctctgggtggaagcctaggagtcttctgctcttccctcccacgggcaatactgagcaggtctctgacctggtccttcccctaccagaacaccgaccccactgacggggaggatctactcactgtctgaccttccggggaggctatgggaaccttgaaggctgaggctggctgttttattcctttttgtatcccaagagcccagcacagagcctgaggccaagcaggtactcaggaatcactgctgcagcatcaccacgtctggtccagcagacgtgcacaagcacccaatgttcacacaagtaaggtccacgagcatgcacatatcatgcaggcccacgcgggacaggcagtgggtggccttgtcatcagccactccctgctgagggtgacggcctcgggctctgcagcagagagatactgagggcatgcttcccagtcagggaaggccaggcggatggggaactgcttgatgacacttggagaaacagggttgtagctcatctacaggacttgggaggggaggagttgaagaggagttgctgggaagacaaggagcagccaccaaaccttccgcgggcttctgcggcaggacagagggcccacaccacttccatccttctccttggcttccttcccttcccacaggaggaccagctacagcctggcctaaagcttaggagggcgactgtgaatggacacaggagccagcaccctcggggcctgacatcgccctcctcagccctccagcacctggtctggcagtttagtatgtgacctttctccctgggatgtggagtcttcggcaacgtgtcctgaagggactggcccgcactccaggaccccacttggcatttcttgtctgttgccttcagactatctcagataggcctgtgcccctgactagcccagtagcacttgtctctagaaaaaggaagctcctgcccaacctggcttgtggaccagtaatatctgtggcctaccacccattcaagaaaacgttacagccggctcactgcaaaatccgcctcccgggttcacgccattctcctgcctcagcctcccgagtagctgggactacaggtgcccgccaccacgcccagctaatttttgtatttttagtagagacggggtttcaccgtgttagccagaatggtttcgatctcctgacctcgtgatccgccccgcctcagcctcccaaaggcatgagccaccgtactcggcctgcccaggctggtcttaaactcctggcctcaggtgatcctactgcctcagcctcctgagtagctgggattacagacacagcccccgttcccagctctagcatttcttaaggacaaaattggtgtgtaagtaacaggaaattcacattatgctgtactcattctctaatatcacagccatgttagaacaaatttgggttttcaaaacaagcgtaactgaacagagtatatatatgtatgtatataaatatatagaaatcctaaatggtccctgtgacataagaaatacacatttggtctctgccccaggttcctggcacagagcttctaaaatgctagtaacttcctgagtggtaggggtgaggggaacatcttttgttatacataagaagcccttttcaaacagatctgagtttatgctaatgatgtgactggcagaggatgggggctggttgccagagaaaccaaccatgtgattagaaggttgaaactttcagccttatcttcctaccgggaggggacaggggctgaagactgagctcatcatcaatgatttaatcaattgtgcccatgtaatggagcctccacttccaaacgaagggtttcagagagcttctaggttggtgaacacatccatgtaccaggaggtctaccccactccacggggacagaaactcttgtgtaggggacccttttagatttcattctatatacctcttcagctggctgttcattttataatcaaccaataaatgttaagtaaagtgtttctctgtgttctatgcattataggaaattatcgaatctgaggagggttttgtgggaatcccctatttgcagccaagctggagagaagtgtgtatcgcctggagacccactacttgcaactggtattggaagtggggatcagcctgttggactgagcccgtaacctattgggtctgcactaactctgggtagtatcagaactgaatgaaattgtagggtacccagttatgtccatagagaactgaagaatcgcttggtgtagaaaaacccacacatctgatgtcagaagtgttctgtggttacagaaaaaaatagtttctccttttagtctcataaatattaaaggattaaataaatatttaaaaatattcccacaaagggccaggggcggtggctcacgcctgtaatcccagcactttgggaggccgaggcgggcggatcacgaggtcaggagatcgagaccatcttggctaacatggtgaagccccatctctactaaaaatacaaaaaattagccgggcgttgtggcaggcgcctgtagtcccagctactcgggaggctgagggaggagaatggcatgaacctgggaggcagagcttgcagtgagctgagatcgcgccgctgtactccagcctgggtgacagggcgagactccatctcaaaaaaaaaaaataaaataataataataataataataatattcccacaaagaaaacatgagaccaaatgatatttccaagttctagcaaactttcaatcaaggatcattcctacctcacacaaactcctccacagagcagaaaaagaaggcacactctgctactcattctatcaggccagagtaagcttcttaccaaaaccagccaagcacattaaaaaggaaagaggccaggtgtgatggctcaagcctgtaatcctgggacactgggaggccaaggtgggagggtcacttgagcccaggatttcaagaaaagtctgggcaacaaagggagaccctatctctacaaaaaattttaaaaaaattagctgggtgtggtggcacacacctgtagtcccagctacttgcggggctaaggtaggaggactgcttgaggccaggaggttgaggctgcagtgagctgtgatagtgccactcactctagcctgggcaacagagcaagcccctgtctcaaaaataaaaaaagaatttacgggctaatcttacccattaacagggaaaggaagaatcttaaacaaaataatagcaaaatgagtagcaacgtataaaaaataaatacaccatgaacatactgggtttattccaagaatgcaaagtttagcattaaaaaacctatcggctgggtgtggtggctcacgcctgcaattccagcaccttgggaggccgaggcgggaacacgaggtcaggagttcaagaccagcatggccaagatggtgaaaccccatctctactaaaactacaaaaattagccaggcacagtggcaggcgcctgtaatcccagctactcaggaggctgaggcaggagaatcgcctgaacccaggcggcagaggttgcagtgagccaagatcacaccactgcactccagcctgggcgacagagagagactctgtctcaaaaaaagaacacaaaaaacctggcaaatgaaatttaccacacagagcaatgcagagcatgaagtcaggaactctgcagagggacccctcaattatccagcagaggctgggctcagtggctcatgcctgtaatcccagcacttgggaggctgaggtaggcagatcacttgagatcaggagtttgagaccagcctggccaatatggtgaaaccccatctctactaaaaatacaaaaattagatgggtgtggtggcgggcacctgtaatccgagctacccaggaggctgagacaggagaatggtttgaacccgggagttggaggttgcagtgagccaagattgtgccaatgcactccagcctgggcgacagagtaagactccgtctcaaaaaacaacaacaacaacaacaaaaaccccccaaacaaataaaattatccagcagaatactgattaaagacataaatatgaagacaaaacttccataaaaaggaagataggtaaatgtgtggcttccttaaaattaaaatgtttgtccaacacacaaggtataaagaaagaggaggccggcaggagttcgagactatcctggccaacatggtgaaaccccgtctctactaaaaatacaagcattagccaggcgaggtggtgcatgactgtagaacattaaacaatcctttgaagaatttagctcttttctccctgcctccaaagccagcaaatatgagattattttctattgttccagtgactgtaataatagcagaggtcaaggaaacatctcttgtatgagagttgtcatggaatcagatttgttgtaa

SEQ ID NO: 2066 - protein, 384 aa, Homo sapiens
MPSPQVEQSYLALFCTHASQLHDHVQDLVLAVLAHLYCIAAAVVVVTYPVCISLLCLGVKERPDPSAPASGPGLSFLAGLSLTTRHPPYLKLVISFLFISAAVQGQGQGQASNLKAKALGSQAKALAARPWRDDAVCSQVSAVLSTPLWEWVLQRFGKKTSAFGIFVSEAGIKDWGWPEGRGPSTGQGMGVVSRVVCEGAGPTKKQVAGQLVCVSPQAMVPFAILLAAVPTAPVAYVVAFVSGVSIAVSLLLPWSMLPDVVDDFQLQHRHGPGLETIFYSSYVFFTKLSGACALGISTLSLEFSGYKAGVCKQAEEVVVTLKVLIGAVPTCMILAGLCILMVGSTPKTPSRDASSRLSLRRYKERGGRQEFETILANMVKPRLY

SEQ ID NO: 2067 - DNA, 21221 bp, Homo sapiens
  source (1)..(21221)
  CDS (201)..(282)
  CDS (4176)..(4405)
  CDS (4595)..(4721)
  CDS (6025)..(6150)
  CDS (7970)..(8028)
  CDS (10689)..(10821)
  CDS (11313)..(11418)
  CDS (11715)..(11850)
  CDS (12037)..(12090)
  CDS (12177)..(12240)
  CDS (12477)..(12532)
  CDS (13008)..(13419)
  CDS (13489)..(13811)
  CDS (13984)..(14190)
  CDS (14354)..(14442)
  CDS (16764)..(16983)
  CDS (18728)..(18841)
  CDS (20899)..(21021)
  modified_base (1947): a, t, c, g, unknown or other
  modified_base (2154)..(2155): a, t, c, g, unknown or other
  modified_base (2174)..(2175): a, t, c, g, unknown or other
  modified_base (2178): a, t, c, g, unknown or other
  modified_base (2181)..(2182): a, t, c, g, unknown or other
  modified_base (2188)..(2189): a, t, c, g, unknown or other
  modified_base (2191)..(2192): a, t, c, g, unknown or other
  modified_base (9482): a, t, c, g, unknown or other
  modified_base (17622): a, t, c, g, unknown or other
agctcggcggcctggcctggcctgctcgcggggaggtgcgcagactgcgcgggggcgtggcctgcgcccctgactgcgctgtcggtccggcctttgatgaggtggccgccgctggctccctgggccccagcctggttcccgcgcgggccgcggctgccttccagacgcagggcatgcgacctgttggagtgtgaaattctatgggccgggttcctccccagagcggttttatttccgactggactgtgctgcgggtctcagaggccctctggtccgttcagggtgaggacagctgagaggcctgggcccgtgagctcttgcagaggagttgacacgcagaggggctgctgtccaataaacgaaagtgtcggggaaaaactttgcagggcgatctgcattactccaaagtgaacacactgcatgtctcagggtggctggaggcggcgaggagaatccccttatgggagtatatgagcttttccatgtgttatctctttaaaacctctcagcggctccgagacaaaactcccagtgtcgcagaggtttcttcatcaataggagtagtgctggagaatcttgggcactgccctcattttgcctgcgaaggaaaaattaggaagggataaaaagtcacaaaaattaggaaggtgggggggataagcaaattccaagggcatctatctctgatgaagggttggtgtctcctgtggtgccctactgtggattagttatttgtgtcctcggtccagaagtttctctggagcccattggctacagctttcctgtattagaattctactgttatttcctactgtagtctggctgggaattttatttagttgttcagattttagatgcattcagtgaatgcagctgctcaaggaagtaactaatagtgtcttaccattttcttagctacttttcagaagaaggaacatgatctctaacagaagttttctggtagattactaaaacaggcagatagtagctttcctggctggctgagttaaatccctctccagcgatcctcccacttcagcctcctaagtagctgggattacaggcatgagccagcgcgcctggcaaatctctctagaataagtcaggatctagaaaataacatagggaaagaatatcttgccagatttcctctgtactgcctattgctctttggtatttactagactgtcttctaataaaaatctcctgagttgagttaaacgtagtgtagattgggggcagagatgggcacaaatgggcatcagagagttctaaaaataaatgtgggcttttcaaaagattggtgtgttgactggagacttctgaacttagaggagcacatttagtttccagggtatcagtttcttttccttttctttctatttttttttttttttcttttttttgagtcatagtctcactctgtcacccaggctggagtgcagtggcgccatctgggctcactgcaacctccgcctcctgagttcaagtgattctcgtgcttcagcctcttgaataagctggaattatagacgtgcgccaccacaccctgctaatttttgtatatttttgtatttttttgttgcccaggctggtctcgaactcttgagctcaagcaatctgcctgccaccatctcccaaagtgctgggattacaggcgtgggccagcttgcctggcccagggtatctctttcatactgtagagaactctcttgagctgagcacacacaggttccaactccttcacagtctttattcttagagatatgaaataacattaagtggttgtcttgtgactttttgtacaagttaatggcatttagctctcaataattctttttcttcaagtacccatgaccctgaaaatgttatgctgtataatactttttcctataaaagttgtaccttgagttatttatacttgtaagaaataacctaggctgggtngtggtggctcacgcctgtaatcccagcactttgggaggctgaggcgggcggatcatgaagtcaggagattgaaaccatcctggctaacacggtgaaaccccatctctactaaaaatacaaaaaattagctgggtgtggtggcacgtgcccgtagtcccagctactcgggaggctgaggcagaaaaatggcttgaacctggcaggcgnnggtgggagttattttaganngcnccnngggggnncnngcctgccccccagagtgagactccatcccctctgccaaaaaataaataacctatatcagatctagtcccccagagaatggaaacttcagagcctttgagcaatgtgaatgaaatgaaagctggaagcttaaagtcttagctctggcttgaatttgtggctgcttgaatgtgggcatttattttgtttgttattgtatctcaaggacttagcccagtgcttggcccacaataaatgcttaataaaacatctgttaaatgagtgaatgaaaaaaaaaatgttgttaaccaatacccatttgtcacactcacatcacaggaaaggtgaggtcatcagggatgaagtcactaacaactgccagtcatgtgccccaagggtagcctcaccatggactagtgggcttgttctgtgtagagaagggatggatagtgaatgccaaggttagttctagctggataaattagccaagggtttcagctggataagttggctgagggtgctacaggtctagccttaaggctgtctcactgaaacattttggagtctggagtcatctgttctgaatagcgcccacatagtttatatttttttattttttgagacagagtctcactctgttgcccaagctggagtgcagtggcacgatctcagctcactgcaacctctgcctcccgggttcaagtgattctcctgcctcagcctcctgagtagctgggactacaggtgcgtgccaccacacccagctaatttttttatttttagtagagacagggttttgccatgttggtcaggctggtctcgaactcctgacctcaggtaatccacctacctcggcctcccaaagtgttgggattaaaggcgtgagccactgtgcccgtccacacatagcttaattcttgagcacagtaaaaatagggtgtacttggggattcaaagggaagcctattggatgagtatttgccaagaaggaatggagcacctgatcttgctggtgatttgaaccttactctaagtgggattagactgccataaatcttgtgtttgtcattcctgggagggtcatcttcaactaagatagctccccttttctagactagagttaggagaatagttaatgtttcagtatttaggactgattctgattttggatttaaaggaaacaaaggtggtgtgtgttttctatttttaatttttaaaagttttgtgtagagactggggtctttttatgttgtccaggctggtctcaaatgcctggcctgttttattttcttttgaatttgcagataagtattaggattattaaatctttttttttgtttgtttgttttttgttgagacagggtctccctctgttgcctagccaatggcatgatcatagctcactgcagcctcaaactcctgggcaatcaagtgattctcccatcagcctctcgggtagctgggactatagctgtgtaccaccttgccctgctaatttttaaatttttttgtaaagatggggtctcactttgttgcccaggctggtctcaaacacctggcctcaaatgaacctcttgcctcggcttctcaaagtgctgggattacagaggtgagccactgtgctcagctggattactaaatttttttttgagatggggtcttgctctgtcacccaggctggagtgcagtggcgtgatctcagctcactgcaacctccacctccctggttcaaaaaaattctcctgccttagtctcctgagtagctaggactacaggcacgcgtcaccacacccagctaattttgtatttttagtagagatggggtttcaccatgttgatcaggctggtcttgaactcctgacctcaggtgatctgcccacctcagcctcccaaagtgctgggattacaggcatgagccaccgcgtccagcctggattactaaatctttacagatgtatcctgactttctctgccttttccctctgtatttgccccaaccagtgcaggcctgagtgttccttccagcatgtcggagggggagtcccagacagtacttagcagtggctcagacccaaaggtagaatcctcatcttcagctcctggcctgacatcagtgtcacctcctgtgacctccacaacctcagctgcttccccagaggaagaagaagaaagtgaagatgagtctgagattttggaagagtcgccctgtgggcgctggcagaagaggcgagaagaggtaaggttatggtacagttactcttgggtgagtgaattctggaaaggtgagaactggaagagcaaagtcttaaaagaggccaaccaaacttcaataggttgggggctaggaggagatgatcatatggagtgttaaaatggaggatttgtgagataagtttaattctctttcatatgaatttcttctcaggtgaatcaacggaatgtaccaggtattgacagtgcatacctggccatggatacagaggaaggtgtagaggttgtgtggaatgaggtacagttctctgaacgcaagaactacaagctgcaggaggtaggtgatgctgaaaaggtgaagcctggggaatgttggaacactgatgttagagaggaattggtgttgggaagctgcccgtgaggagagtatgttggggttagatcgtttctggggagggatagggaatggcttctcaggattattacagtgatttgtgaactctgttattccactgtctcccttgctttcaggaaaaggttcgtgctgtgtttgataatctgattcaattggagcatcttaacattgttaagtttcacaaatattgggctgacattaaagagaacaaggccagggtaagaattttttccccatatttcctgaacttattgcaaagagactagctacatttattattgttccttttacactcagagattaaaacaaggtagttttgaaacagaactggaatcagctgcaatggcgataagagtagggcttcagttgtcacctatgccttttgtgtggctatagattgggcagaaaatgagtgaacttttgcttccttcttcccataactttcattgcttgttttcattgccctatttagtctaagtaagtaaagctaagaacaaaaggagagaaattttaacaaaccttcaaatttaaaatatgttaacaagggaagggatcatttctactataaggccttttagtaagtgctttgcctccccaggtcatttttatcacagaatacatgtcatctgggagtctgaagcaatttctgaagaagaccaaaaagaaccacaagacgatgaatgaaaaggtatagaaggagagcagacaaagtttgaggctggtttttgggggtggttttaaaaaggactctgttaataatgaagctgatcaggaagggacggaaggagctagtgggagagagttaagagagggaattactgctgacccttggatccaactttgttccaggcatggaagcgttggtgcacacaaatcctctctgccctaaggtaagtagtacctggttagtttcttacccatatttcctgatgtagttactccaaacagatttcagggcactactcttctgttctattctgcctctccccactttctttgaatcatatactgtcaagattagggcccctacgggtcttttaaagggtgcgtcctaatgccctaaccacgacacttatctcctacctctttctcctagtgcttatccagctatttaaatcatcaggcataatggagattcagagtgtggggattatctttatggtgaccagcaggagacctggcccttgctcctcttaacccttgggttccccctgcccttaatttcccagtggcccctctaacagcccagtgcccccacagctacctgcactcctgtgacccccccatcatccatgggaacctgacctgtgacaccatcttcatccagcacaacggactcatcaagattggctctggtgaggggagggagaggttctgggcaggggagcctcgggaatttgggaaccatgggggtaagatgaaaggaatgggggataacagagcaaaattctgaggtgtgggctggtgagaagagaaaggaccttgctaggagtaattaataggagaggccagttaattagtggagagggggtaggatatataatcttacacctttttgaagggaaaattggggttaatacagagatactgataagaggctgggaaagggcaagagataggtttgaggtttgatttgagtcctggggccagaccctgccagaggaggttccaggctgttcctgctgtgagtgctttcgtttgctgtgtattgtatgcagtgtacaacatttctgtgtgctgtgtctgtgtggtatttgtgtgtccatttgtctggggcttggctgctccatcgctcacaacttttctctgttttcctccctcccgcttacgggctgctctgttcccaacagtctttcataggatttttgctaatggtgagagctccctctgccccacttggggctctgtttgtgctccctctgctcccttggcggctgcccagtgcatgcagtcgtgggagcaaaccctcttcccctatcttccctgcctaattatgcctgcttagcttctgccctgccagccctccgcctgcttgccccttcataacctgcttgtttcctgtggattctgcctggctggccacttacctcctggattcatgttctccctcatcatcaggctagttcccagatcatactgtgctcccagattctctgtgacttgtagtcattgtttatgatctgagtgagtccaaattgggcctggtcctggttcctcgttcagctctgtggcagacagtgttgaggaataagggggtagaacaggagtctaaaatgttttggtggattaaaagtggaacagattcaagggtattagctcaattctgagctgttttgagtttcactcagcaaaggtgggtaagaaggaggctacctcctgagctgtatgttaatacttcttatccttatttatccaagttcctgaggtctccaattgtcccagattaggaagggctgcctgtgtttttatgttatttgcagggtggatgaaaaaactaaaaccaaatattttcatgtgagcagggattagaggtacctgggatttagggaaggtgaacgcagtacaagtgaaaatttttccttaaacttcattgcttctagaccagcctgaagcccctgtgtatctgttaatttagtctggtgcttttgttgctcctgatttagggacattagatgagaagcagtaggcctaagaaaggggaggtaggtggcatccatgtgtggtctgtagttcaggacaggaaagggaatacgtttgtgcctgttgagggtcatcagaaaggagacttcaggagagaatttggcttttggggcctctctctggagtgagactattcttcattgatgatggtcagattgtgggtgtctcccctactcccagtggctcctgacactatcaacaatcatgtgaagacttgtcgagaagagcagaagaatctacacttctttgcaccagagtatggaggtgagccttcctgctttctctgccctgtcctcatccccctgcttttgcaccttataacttgaggtacagaggcaatataactgaaacttctaggccttctctaccagcatacaaaatatttttcttttcttttttttttttcctaaggcattcctgccaaccctagcccccaatcctctgattaaccaaagccttctctgttttccctagaagtcactaatgtgacaacagcagtggacatctactcctttggcatgtgtgcactggaggtgaggggactggaggggaggggggaaaggggtcagatgagaagatggaattgggaatggagggaagacaagtaaggcgctggcttggagggagtgattgtgggagcactgaagttcttaggtgtctacttttttttttattcttcctcactgaagatggcagtgctggagattcagggcaatggagagtcctcatatgtgccacaggaagccatcagcagtgccatccagcttctagaagacccattacagagggtaaggatcttcaggatcactccctcctcaactgaccttcaaatgtcttctggtttttcttcctttgtacccactgggtatatgctcctaagagctagggaacataacagaaaggacacgaaaaatctataaacattttcttaggaggtgcctaccatgtttttgcatagaaacacacaggtaagggggttaagatggatgatgctggggttaaaagttgtgtgttggaagccgggcatggtggctcacgcctgtaatcccagcactttgggaggccgaggcgggcggatcacgaggtcaggggatcgagaccatcctggctaacatggtgaaaccctgtctctactaaaaatacaaaaaaaattagccaggcttggtggcgggagcctgtagtcccagctactcaggaggctgaggcaggagaatggcatgaacccgggaggcaaagcttgcagtgagctgagatcgcgccactgcactccagcctgggcgacacaggtagactccgtctcagaaaaaaagaaaaaaaaaaaagttgtgtgttggctgggtgcagtggctcacacctgtaatcccagcactttgagaggctgaggcgggtggatcacttgaggtcaggagtttgagaccagcctggccaacatggtgaaaccctgtctctactaaaaatacaaaaattagctgggcatggtggtgtgtgcctgtagtctcacctactcgggaggctgaggcaagcttgaacccgggaggcggagattgcagtgagctgagattgggccactgcactccagccggggcaagagagcgagactgtctcaaaaaaaaaaaaaaaagtatgttaatttgaatgtgtctacatggaggtaaattaatttgatggttacttcaggccattgctgtatactctcagacagccatttttatatttttaagcacatcagtcaatttaaattaaaccagttgtttgggattttatatttatacagttttagttagggacggtggcctgaaataatgagctaagatttaaaagacataaggttatgaatcagttgatagactatagtaagcagagcctgggcaggaaggtccaaacaagaacagtttgtaactcattagataagtatagtagggaacaggagagaaaagaagactagtgggaagtcaggaggatagtgtggagtaagtttctacttcancattgaggtgcagtataaaagtgaaagattaggtatgtgaccttgttagccttcaaggttaaaagcaggaaagcaggttaattgtcatgggacatgcaggaggtagaaaaggaggcggtggtggaacatggtggctcatacttttaatcccagcacttttgttttctgaggtcggaggatcacttgagctcaggagttcgagactagcttgggcaaggtggtaaaaccctatctgtatgaaaaaataaaaattatctgggtatggtggcacatgcctgtggtcccagctactttggaagctgaagtgggaggattgcttgaccccaggaggttgaggcagcagtgagctgtgattgtgccactgtactccagcctggttggcacagcaagaccctgtctcagaaaaaagaaggaaagaaattagggcagaattgttagaggaatcctgggaaattcggtgaattcagtgattgtgggcaaaggaaattgtgatactaggcttgtgaaataaaaaaatggtgaatattgatcacattgggtaagtttgggaagagagaagctaaatttggcaagatttagaaaagaagataggcagtgagttgactaataaagcagagaggtagaaactaaggaaaaagaaagtgtggggccgggcgcggtgtctcatgcctgtaataccggcactttgggaggctgaggcgggtggatcacgaggtcaggagattgagaccatcctggctaacatggtgaaaccgtctctactgaaaatacaaaaaattagccgggcatggtggtgggcacctgtagtcccagctactcgggaggctgaggcaggagaatggcgtgaacccggtaggcagaggttgcagtgagctgagattgcgccactgcactccagcctgggcgacagagcgagactccgtctcaaaaaaaaaaaaaaaaaaattgtgaacattaaaaaagaaagcttgtggttggagagcagaaaaataattaaaaccagaaaggcagtggatggtatctttcatataatatcttacagtttttgaagccctttcaggtgcatttttcaatatattgttttctcagcaagtgctgagcacctactatgtacaaagccttgtgctaagtagaatgagagctataaagatgaacacactgggggcttgccagatgcctgctccagttccttgtttccttttctaggagttcattcaaaagtgcctgcagtctgagcctgctcgcagaccaacagccagagaacttctgttccacccagcattgtttgaagtgccctcgctcaaactccttgcggcccactgcattgtgggacaccaacgtgagtcgtcttggccctatggggaatagtcttccaatctggagccctgtaactatcactggcatgcttgttttcctctttatttccaaagggattctttttttttttttttttttttgagagatagtctcactctgtcacctaggctggagtgcagtggcactatctcagctcactgaaacctccacctcccaggctcaagcgattcttgtgccttagcctcccgaagagctgggattacaggcatgtgccaccatgcctgggtaatttttgtacttttagtagagatggggtttcgccatgttggccaggctggtcttgaactggcgtcaagtgatctgtccgcctcggcttcccaaagtgctgggattacaggcatgagccactgtgccaggcctccaaagggattctttacccctttgcctgcatgccttctatgacatttaatctgactatcccttcataatatcccactccatcatgccctccagacatgatcccagagaacgctctagaggagatcaccaaaaacatggatactagtgccgtactggctgaaatccctgcaggaccaggaagagaaccagttcagactttgtgagtaactgagagggtctgaaaggggcagattggtcactaccactcttgaggctctgtaaactgtccattctctgggaatgcttgaatttgctattttgcttgtttctttccttccatctcctttctcttttctcgtccaggtactctcagtcaccagctctggaattagataaattccttgaagatgtcaggtgagagcagagtgagaagcaggctttcttgaggaagcaggcggggttgggtatcctaaggcgttcacagagcccatgtgacctgtcttcatctccctccaggaatgggatctatcctctgacagcctttgggctgcctcggccccagcagccacagcaggaggaggtgacatcacctgtcgtgcccccctctgtcaagactccgacacctgaaccagctgaggtggagactcgcaaggtgggggctgtgtgggtgtggattgtctccatggttgtggtggaagggagagaggacatctcaaataaggctctatcctttagagaaaatgctccctagcagccatgccctatgggctcgaaagacgtctaggtattgggttttttatggacaggtctctagagtgaccctctcttccctccctaggtggtgctgatgcagtgcaacattgagtcggtggaggagggagtcaaacaccacgtaaggctcagggctagggttgcgcagggctagtagccagagggtagggaagaaaagtctcattttctgactgtcctattctccagctgacacttctgctgaagttggaggacaaactgaaccggcacctgagctgtgacctgatgccaagtgagtctctcctttccctcagaggatggagagtctatgagccttatcttttagggacatattcaggggtgggggaggtgacaaggcagtaacacattgactcacatagaatgactatcttagaccctaaagcagtgggtggatctgactgacagtttagccctagtggggctgtctgaagggccccaggtccctcagtcccgtactgtactcaccccctcctgtttctttgtcagatgagaatatccccgagttggcggctgagctggtgcagctgggcttcattagtgaggtgaggtttctgccttcatctgccctggctgcccccatgccttctcttctctcagcccccatcttactgagctcttctcccccaggctgaccagagccggttgacttctctgctagaagagaccttgaacaagttcaattttgccaggaacagtaccctcaactcagccgctgtcaccgtctcctcttagagctcactcgggccaggccctgatctgcgctgtggctgtccctggacgtgctgcagccctcctgtcccttccccccagtcagtattaccctgtgaagccccttctctcctttattattcaggagggctgggggggctccctggttctgagcatcatcctttcccctcccctctcttcctcccctctgcactttgtttacttgttttgcacagacgtgggcctgggccttctcagcagccgccttctagttgggggctagtcgctgatctgccggctcccgcccagcctgtgtggaaaggaggcccacgggcactaggggagccgaattctacaatcccgctggggcggccggggcgggagagaaaggtggtgctgcagtggtggccctggggggccattcgattcgcctcagttgctgctgtaataaaagtctactttttgctaaaagcgtcgtgtgttcgcgcctttcccgccagggggagcgggcccggggcggaggcggggcccaggtgggagggggacccgggacggaggcggggcccaggttggggcggggccgggcccaggtacagcggccctgcggctggcgcggcggacgggatgaggcgctgcagtctctgcgctttcggtaacttccgggccctggcgtctcgtctccttaccctggggctacccttgcccggtcctactgcccgcggttaacccgccgcgagccgcctctcccctccccgcccgactcaaccctgccctcccccgtgctttgcagacgccgcccgggggcccaggcggctgatgcgtgtgggcctcgcgctgatcttggtgggccacgtgaacctgctgctgggggccgtgctgcatggcaccgtcctgcggcacgtggccaatccccgcggcgctgtcacgccggagtacaccgtagccaatgtcatctctgtcggctcggggctgctggtgagcgcggcaggcgacccgggcgggggccgggctcccggagagcccagcaggccaaaggctttgtgtcttccacagagcgtttccgtgggacttgtggccctcctggcgtccaggaaccttcttcgccctccactggtgagagggacttccctggagcttttaacgagtaggcttgagtcagggaaatgggggctgactgagcttggtctttcaatagattggaggagcctcagagaaactgggtgtctagtcactgggagagttagccaggcccaggctgctcaccctgatctcctgtccctgccagcactgggtcctgctggcactagctctggtgaacctgctcttgtccgttgcctgctccctgggcctcctccttgctgtgtcactcactgtggccaacggtggccgccgccttattgctgactgccacccaggactgctggatcctctggtaccactggatgaggggccgggacatactgactgcccctttgaccccacaagaatctatgtgagcacattctcttccttcttgtggtctacaaagccttggtcctgcccttttaatttcccctatttgctgcacttgccctactccctcctactccccatccttcttgcttttcaggatacagccttggctctctggatcccttctttgctcatgtctgcaggggaggctgctctatctggttactgctgtgtggctgcactcactctacgtggagttgggccctgcaggaaggacggacttcaggggcaggtaaggaaggcaaacaggaagggttcattccacagagactggctgtgttgaaaagatgctgaccggccgggtgcggaggctcacacctgtaatcccagcactttgggaggctgaggcaggcggatcacttgaggtcaggagtttgagaccagcttggacaacatggtgaaacctcgtctctactaaaaatacaaaaaattaggtggggtggtgggcgcctgtaatcccagctacttggaaggctgaggcaggagaatcgcttgaacccggaaggcggaggttgcagtgaaccgagatcacgccactgcactccagcctgggcaacagagtgaggctccgtcacaaaaaacaaaacaaaaaaaagatgctgacctatcattcagggcgagggtgtctaactctatcttcttctgcagctagaggaaatgacagagcttgaatctcctaaatgtaaaaggcaggaaaatgagcagctactggatcaaaatcaagaaatccgggcatcacagagaagttgggtttaggacaggtaatgggccttgaaggtggtggcccgggtaagagcggggacaaggaagtgctcttagaactgggtctaggtcttgccatgctgctttcccctctgacctgggttggttctcccctctgtccagcaggtgctgttccgagactcagtcctaaagggttttttttcccactaagcaaggggccctgacctcgggatgagataacaaattgtaataaagtaacttctcttttcttctacttgattatgattccttttggggaaaaggcactgtgtggtgttgggaatgactttgatcaaagaatacagtggtctcaattatttataaaactttaatgagggagaggccctaactcttcctcagctctaccgactactgaaaggaaaagctggtgctggggagccctccacaccactgactgatgaatttcagcacgtcctggcacactgggctgtgggaggtctgtgagcaaatggaagaacatgagaggaacttgttaatgctggaaatacaaaatcagctccatcgcaggcttcagggtctgcatctgccttcctgtaatcccacccatctttctagtgtgtatgtgggttttttgtttgtttgttttgagacaaagtcttgctttgtcgcccaggctggagtgcagtggcacaatctcagctcactgcaacctctgcctctcgggtttaagcgattctcctgcctcagcctcctgagtagctgggattacaggtgcacgccaccagacccggctaacttttgtatttttagtagagacgaggttttaaccatgttggccaggctggtctcaaactcctgacctcaggtgatccgcccaccttggcctcccaaagtgctgggattaaaggtatgagccactgcacccagacttgtttttttttctttttttagtgctgccctctctgccttcattctccaagtcctcctctctaaccttgatggccataaggaatttattccagttgtccttgttagcagccttccctggccgcttaaattcaattttgttcctcagaatggggtatcctgtggaggaagaaaaaatgatgaactggggtttgagagagattgaggagggaaaaatgaggagcagcctggggggtagaaagcacagtcctgtcttttgtaccctttactgaatcctagtaaaattaagtttattgatcctgctgctttctacccaccacaggatctggggtgctgtaggcttctatacctgtaataaggcagggcagggctcgaacaccagtgctcgctgccactagggaggcctcgtaggcgccacgctcatcccgaggcagaacctgctccagccgctggtccatggagactgtaagcacccagtctcgaacctcttctctctcagcctcctggaaaggacaagaagggagtggtagcttcacacagggcagggcaggacaagttggggtggatgggtgaggagggggtttgctaagccctcatcctgtataccagcttttagccacgaatcctccttggattgggggatgcagtcacagccttttctttctattttgcttctactttcactgaaaaaacagtgagggctgaggtccttccaaagatggcagcacaaagatattctccctcctcaaggcactcacactggtgaggccttccggttttccaaccctgtgcccttaccggtacatgctgcttagctgggagtggcacctcaaagggaatgtctgtatcctgaaaatcagagtggtcaaggccatctagagtcccttcctcgattgcctgcagtagagtgggcaaccatgaactaggcacagctcgcgactggcaaaaacctccaccctcggggcacagcttccctactcacatcggtcaggtccaaaaagcgattgaggaagatgaatgccatgttatcccagccaactgcctgcagcaaagaagagttgcaaatgggagtgaacaagctgggtttgaatgctacttctctgggatccagatgcaaatgggagtgagcaagctgggcttgaatgctatttctctgggatccagggagaaaaatccaggaagacataggaggactacatcctccgtaacatcagccctacactcagctttcctctaccagagcagaagggatattctattttccaacctttaacttcctcctatctgccccacccttccttgtcccagctcaccttggcagcaatgcctgcttcatagaaggctttgtctacaggtagtagctgggtgtgacgcaagagtgaaacagaaagcctggcagccacggtttcctgggattaaagtcaaagcattatgaatatggcactaaagtgactgagctaccagaccaatgatcctgtaaggcagccacagaactaaaaaacaacaattattattaaactgctctggatctcaagctgttctgggtcttagtttttttttttctttttctctgaacaagacacctgggcctaggttcaattctttcgcccaggctggagtgcagtggtgccatctcagctcactgcaacctctgcctcccggattcaagtaattctcgtgcctcagcctcctgagtagctaggactacaagcgcacattaccatgcctggctaattttttttttttttaaaaaaaaaatttntgagacggagtctcgctctgtcgcccaggccagactgcggactgcagtggcgcaatctcggctcactgcaagctccgcttcccgggttcacgccattctcctgcctcagcctcccgagtagctgggactacaggcgcccgccaccgcgcctggctaattttttgtatttttagtagagacggggtttcaccttgttagccaggatggtctcgatctcctgacctcatgatccacccgcctcggcctcccaaagtgctgggattacaggcgtgagccaccgcgcccggccaacctggctaatttttatgtttttagtagagatggggtttcaccacgttggccaggctggtctcgaactcctggcctcaagtgatccacccgcctcggcctcccaaagtgctgggattacaggggtgagccaccacacccacccacctagattgtttctaaggttctttccacttctagaattctatcatccaagtacatgaaataaatatacagtgaacagtcaaaaataagcccagaatatgtgtacattataagaggtgaataaagaaatcatgggatttggatgtttaaacataatgaggctgaggctgtgtgggcacagagccctaaaaaggtcggaagaagaaaacctcagcaagggctaaagatttgtttagacagaagagaagctgaaagacaggtggggagattcaagagcccaagctgaagaatccagaacgtgaatcaattcagctttatacatttgcagatgagcccttctgactgagtgttccttcgaccccctacatctcaccagctgtttgacactctgggctgcagagcgcgtggcatagtaatgagcgatcagcagcatcgtcttgaactcctcatgggctggagagtttgcctcactggacttcaccaggttttcacactagaggagggagacagcacagcctggctcaggggtcagaggagtgccagggccatagagtggtctctgatagccacctggcagaggaaggtaaaatacatctgagaataaaggtttatgtgcatcaaagaagagatgaggacaaggacagacggagcagccctttcgcttcctcaccaggttgaagaggacatctcgaagatcagcccagctatgataggcctcggcacagttggttccaggagagctcaccatgtcagtgaagatccttttgtagatattgaagttctagaggtagagggaagaaggggatctgagaagggcatagctagaagagaaagtcactggaagtggggccaaagggaggagaaacaggctttgtgtgtagaaatgggtatgtgtgtgtgtgcaagggctgggggacagtggcagatttttatttttatttatttttatttttttaattttatttatttatttttgagacagagtcttgctctgttgcccaaggctggagtgcagtagcatgatctcggctcactgcaagctctgcctcccaggttcatgccattctcctgcctcagcctcccgagtagctgggactataggtgcctgccaccacgcccagctaactttttatatttttagtagagacggggtttcaccgtgttagccacaatggtctcgatctcctgacctcgtaatccgcctgcctcggcctcccaaagtgttgggattacaggcgtgagccaccatgcccggccaacagtggcagattattaagtgctgattatttttaatgaagtaaattatttttaagtgctgattatttttgataaagagaaaagaggaagaaataactttcttagctggtgctgtgtgagtgtgggcaactgtacaaatgtaaatgcagagtcacaacattgtgactcagatcagggagcagtgttcattctctggaggaagtcaataaaggccctagaggtgtatgcaggattcatctctgaaagacaggtgcctgtgtatttgctaacagcatggggagctccacgggtgtttcttcaaacagaagttggaagtttctgcaaacctccccatgctcttagcaaatacacagcctccagagaggctgtacatttctggagatgcgtggggggctctgggcatgacgttctctaaggatagaatcctctgagaagatagttcctgagaagataggtggttctagaggagaaagagctttcttgtggaaacattcaacccaaggagaaggctggtacctgtgggttagcaggggctccgtgctgtacatacagggccaatgcctgggcagagctaccctcccggatcaagtgagttgcatacaaagccacatacttgtgcagaatcttgtagttctgtacaggggtggaggaaaagcatgagtgaggctgggatcggcaagaccaagcagtgaggtgacttgaggccatgtatttgttgaggggaaaaagggtgtacgcaaacctctgaccccagtttcagactgagcttctctgatgcccattagaaatctttgggctttgggtttttgtggaggtagaagagatgcatctttgaggcaggtggggaatcaagggaaaatgtaaagaaaaactgggaatgggaagagagcagtacctgcttggtagctgtttcaatgcacttgtcccactggccctgctccacatacaggtccaaagcagctatcacatccacacccaccagctgggtcaatggaagacagagttacaagagaaaagagatgacatgagggaaagaagagggagagagtcttgtgagtctctccctgcattctgcctcctgctaactctccaagtctcaccgagtccactttgccctgattcttgaggaactctttataatgctggtccacatagtcttcatacctgtgaagatgttcagagagctccatcttcatgttccagaataccaaccctcccggtaagactttctcccagtctttacaaaaggaagtaaaagagaatttcgcagtaagaaggggttacaagcttacctgggatctaactccttagctacacgcttcgccttgttccactcctcaccctcgatgaaagcatcgattgcttccttgacaaggtccagattcagatagagctctgcagcctgcacagtgggaaatcagcgtggagactttctcctcgctcccagtcttcccactgtgagctctcccatctgtttccccaggactgcaagccatgcccaccaggaggcccacctcacacaccttcctgggtgtagatgtcacccttgcacccatctctgtgaaatctatttctgttccatctcagcatcctacttactgcactgtgctttccaattccaatcagctggggtcctacagccagaacgacttccatattacgttggggaggcagaaacttgatggagagttcagctgcctgagtggttgaacagaagatggaaatgggtaggagagacaaataccgctgagtcctcagcctcatccatttcatacatttttctcctccagatgccaactttttctcttactctccccttcaaccttgcaccctcctgggcaaaacctggctcatggtccattagatcctttgattagccatcagtggacctatctttcctctcagttcat

SEQ ID NO: 2068 - protein, 886 aa, Homo sapiens
MGRVPPQSGFISDWTVLRVSEALWSVQGLSVPSSMSEGESQTVLSSGSDPKVESSSSAPGLTSVSPPVTSTTSAASPEEEEESEDESEILEESPCGRWQKRREEVNQRNVPGIDSAYLAMDTEEGVEVVWNEVQFSERKNYKLQEVVAPLTAQCPHSYLHSCDPPIIHGNLTCDTIFIQHNGLIKIGSEVTNVTTAVDIYSFGMCALEEFIQKCLQSEPARRPTARELLFHPALFEVPSLKLLAAHCIVGHQHMIPENALEEITKNMDTSAVLAEIPAGPGREPVQTLNGIYPLTAFGLPRPQQPQQEEVTSPVVPPSVKTPTPEPAEVETRKVVLMQCNIESVEEGVKHHLTLLLKLEDKLNRHLSCDLMPNENIPELAAELVQLGFISEPVWKGGPRALGEPNSTIPLGRPGRERKVVLQWWPWGAIRFASVAAVIKVYFLLKASCVRAFPARGSGPGAEAGPRWEGDPGRRRGPGWGGAGPRYSGPAAGAADGMRRCSLCAFGNFRALASRLLTLGLPLPGPTARDAARGPRRLMRVGLALILVGHVNLLLGAVLHGTVLRHVANPRGAVTPEYTVANVISVGSGLLVSAAGDPGGGRAPGEPSRPKALCLPQSVSVGLVALLASRNLLRPPLHWVLLALALVNLLLSVACSLGLLLAVSLTVANGGRRLIADCHPGLLDPLVPLDEGPGHTDCPFDPTRIYGRLLYLVTAVWLHSLYVELGPAGRTDFRGSRVGNHELGTARDWQKPPPSGHSFPTHIGQVQKAIEEDECHVIPANCLQQRRVANGSEQAGFECYFSGIQMQMGVEEDISKISPAMIGLGTVGSRRAHHVSEDPFVDIEVLEHPTYCTVLSNSNQLGSYSQNDFHITLGRQKLDGEFSCLSG

SEQ ID NO: 2069 - DNA, 10948 bp, Homo sapiens
  source (1)..(10948)
  CDS (201)..(572)
  CDS (1011)..(1148)
  CDS (1986)..(2325)
  CDS (2353)..(2484)
  CDS (2638)..(2820)
  CDS (3675)..(3857)
  CDS (4320)..(4429)
  CDS (4632)..(4697)
  CDS (4867)..(4992)
  CDS (5152)..(5228)
  CDS (5316)..(5379)
  CDS (5492)..(5577)
  CDS (5753)..(5810)
  CDS (6327)..(6431)
  CDS (7312)..(7406)
  CDS (7489)..(7557)
  CDS (7741)..(7845)
  CDS (9174)..(9447)
  CDS (10656)..(10748)
  modified_base (6983)..(7082): a, t, c, g, unknown or other
  modified_base (9991): a, t, c, g, unknown or other
  modified_base (10873): a, t, c, g, unknown or other
acgtgctccttcccgggacccccgcagcttgggcccagcggctacgtgagcaaggcacccggatgtccgcgccgctctccgagtgaccagtcccggcctccggtcccgcagtgcccgcagcctcggccggcgtccacgcattgccatggtgactgtgggcaactactgcgaggccgaaggggcccgtgggtccggcctggatgcaggatggcctgagtccctgcttcttcttcacgctcgtgccctcgacgcggatggctctggggactctggccttggtgctggctcttccctgcagacgccgggagcggccgctggctgctgattcgctgtcttggggggccggccctcgcatctctccctacgtgctgcagctgcttctggccacacttcaggcggcgctgcccctggccggcctggctggctgggtggcactgccgggggcgcccactgccaagctatctacttctggcctccgtgctggagagtctggccggcgcctgtgcgctgtggctgcttgtcgtggagcggagccaggcacggcagcgtctggcaatgggcatctggatcaagttcaggcacagccctggtctcctgctcctctggactgtggcgtttgcagctgagaacttggccctggtgtcttggaacagcccacagtggtggtgggcaagggcagacttgggccagcaggtgagggactctgtgggaagggggaagcctctgctggccgggcttgggagaaagcactgcatgtccagtcacactgcttccaggctttaggatgcctctaagcaaagggagaagggaggggctgagtcctgccgggagctgatagccagctggtggggtgtgtctttgctgagtcactgtggttttgcttttttttttttttttaagcctgtaagtgctgaatgtgttcatgacaccagtccccggccctattataagtagtaatacaatgaaattttatcctcaatgatactctctccacttatatttcattctaggttcagtttagcctgtgggtgctgcggtatgtggtctctggagggctgtttgtcctgggtctctgggcccctggacttcgtccccagtcctatacattgcaggttcatgaagaggaccaagatgtggaaaggagccaggtacacctcagtttctttttttttttggagacggagtcttgctctgtcaccaggctggagtgcagtggcgtgatctcagctcactgcaacctccacctcccgggttcaagcgattctcctgcctcagcctcctgagtagctgggactacaggtgcatgacaccacacccagctaagttttgtatttttagtagagacagggtttcacagcattggccaggatggtctcgatctcttgacctcgtgatccgcctgcctcagcctcccaaagtgctaggattacaggcgtgagccactgcgcctggcctctttttgtttttaagacggaatcttgctccgtcacccaggctggagtgtagtggcgcgatctcagctcactgcaccctctgcctcctgggttcaaacaattctcgtgcctcagcctcccaagtagctgggattacaggtgtgtacccggctaatttttgtatttttagtggagatggggtttcaccatgttggccaggctagtcttgaactcctgacctcaggtgacccacctgcctcggactcccaaagtgctgggattacaggcatgagccactgcaccagaccccacctcagtttctgaatcctggagtctcttcatttcattccctgtcatcattccttcccccaaaatgaaatgcttcttttccaaatctcagtttgcaacttagtttttctgaccccatcaaggatcacttgtgggtctgagatacctgggagctgtaaccccataggtttttccctgaagggtttctggctagtgcacttacttgatttctgagctcccttcctacgtgtttcaccatcctaggttcggtcagcagcccaacagtctacctggcgagattttggcaggaagctccgcctcctgagtggctacctgtggcctcgagggagtccagctctgcagctggtggtgctcatctgcctggggctcatgggtttggaacgggcactcaatgtgttggtgcctatattctataggaacattggtgagcaggaggagcaccagctcagtgtgctggtccttcatcagcctggtggctgggatggtccttacctagggaggtgggacagagctgggtggtcagaaagagactgtggctggtacctggggccattttgcctgaagagagtcctgggcgccataagtgggttctgactcgtttcctccacagtgaacttgctgactgagaaggcaccttggaactctctggcctggactgttaccagttacgtcttcctcaagttcctccaggggggtggcactggcagtacaggtatgagagactccgccctcaccctgctaggtataggtccctcccacaggcattccctcagcatccgcctctcccagcattcctccccagcccccatgtactctcagacctttcacatcctggtgctgggctgacgtccctcagctcccaggccctactgaggcgtcccccggctccctgcaggcttcgtgagcaacctgcgcaccttcctgtggatccgggtgcagcagttcacgtctcggcgggtggagctgctcatcttctcccacctgcacgagctctcactgcgctggcacctggggcgccgcacaggggaggtgctgcggatcgcgatcggggcacatccagtgtcacagggctgctcaggtgccgccccagtggaaagggcatgtgggagggtggagccggagaagcagggataggggcccgtgggaggaagagaacagaccccgcctgagaagctgccgctcccaccttggtgttttttaaagtataggattattgtatacatgctctcctaataacttaggtaatgcgggcagagggcaaatctctttcgagctgcacttactttttcagagcttcccactctgtttagtatgttgggttctgctctttttttgagacagggtcacgctctgtcacccaggctggagtacagtggcataatctctgcggcactgcaacgctctgctcccgggttcaagcaattctcctgcctcagcctcctgagtagctgggattacagatgtgcaccagcatgcctggctaattattagattttttgtagaaacagggtttcaccatgttggccaggctggcctggaactcctagcatcatgtgatctgcccacctagcattccaaagtgctgggattacagttgtgagccattgtgcccagctgggttctgcttttttgcatttttacatacatattatatatgcagactcacagaactaatatggcattgtggaggtttttcctaaaacaaatggtattgtgacatagccatcattctcagagttgcttattaacagaacattatggagatatatttttcttccatgcctgaaggtctccctcattcattgtaattgatacagagaattctgtagtttgagcatggttgatttagccacccacctcttgagggtagaattaattaagactggttccagtctgttgcttgaaaataaaacactaccctgaaatgcctagaggcagggttgctgggtctaagcccccagacctttcttattcacttgacctgccctcctagctacctggtgttcaatgtcatccccacgctggccgacatcatcattggcatcatctacttcagcatgttcttcaacgcctggtttggcctcattgtgttcctgtgcatgagtctttacctcagtgagtgctgctgggagacaccgtctccctgaactatccagggactcccttggccatgagctgtgcccccactcaagtgacccacctatgggaggctgtggattggtggacttgaatgggctcctagtgctcgtcatgtgatgggcgggtctcttctgtcaaatcaaaccttaacctagctgaggggctggggaaggacattcttgtcacgttaagtctgagccgtggacacaggtcaaggaagcctcgtttgtgtaacaagatgcagcttgctttcatttaccaaaagcgttttctacacatgagactttgtgcaggctgcagaggtgcctccctgtggaatctgggtgtccgggcttgagcataggcttagtgtgtacatggcaggtagtggacattgacatttggtctctgcttttggggatgatgtcctattctgctccccatcctgtcactctccagccctgaccattgtggtcactgagtggagaaccaagtttcgtcgtgctatgaacacacaggagaacgctacccgggcacgagcagtggactctctgctaaacttcgagacggtaacagagggcccggtggcagtggtgtgaggcgtggagatgtggaggagtgtaaccaggaccactggggctgacagagagctgggggtgtgatgtttgtgtgtgatgtttgaactcaggaaggaggattgagagttggggggaatgacccgagtgccatgtgctgtgcccatgccaaataaatttggtttgaattcatcaggtgaagtattacaacgccgagagttacgaagtggaacgctatcgagaggccatcatcaaatatcaggtgaggatgctagtttgaggcctccggagaataatgccctggcctggtagaattttcagggccaagagtgatagtcgagtgttggggtagaaggggcctgggcccaggtttggactcactgatggccattgtgtataggacattcctcttcctgtgttattgccctcagggtttggagtggaagtcgagcgcttcactggttttactaaatcagacccagaacctggtgattgggctcgggctcctcgccggctccctgctttgcgcatactttgtcactgagcagaagctacaggtgaggcaggatcttggatgagagagtggggcacaaggaaaagggggcctgaggcctgtgtctggtcaccaggctcttcggtaggaagtgggcagggtgacacaagaagagcggcctgcaggccccccgtgacatgctctgcttccttgattgccacaggttggggactatgtgctctttggcacctacattatccagctgtacatgcccctcaattggtttggcacctactacaggtaatctgagccctggccctcacctgtccagggcacattattatttcctggctactcagagaagtcctaaccagcacctttttgcaggatgatccagaccaacttcattgacatggagaacatgtttgacttgctgaaagaggagacagaagtgagcgaagggagaggagtagggtttggggagggaggagctgtgtggtgtttctcgtgcttggaaaacacaaagctgagaacctcagcacacatgggtggtgcccttccaggtgaaggaccttcctggagcagggccccttcgctttcagaagggccgtattgagtttgagaacgtgcacttcagctatgccgatgggtgaggccttccttttgcttcctttgcttttccgttcatttgcacactgccttcctgcttctcagtgctctgaatccctgcttttggaaaagagcctgggcaggggaggggcagggcctactagcagctctggtgatggaaggtgcctgctgagcaaccccacctttccttgcaggcgggagactctgcaggacgtgtctttcactgtgatgcctggacagacacttgccctggtgagaggagacccagccacttggcccagatgcctcaagcttccctcattcagtgcccatggtagcttgtgacccaggctgtggagtcagagagcccagtcacgataggcaaccggattgaatggtgcagcctccatggacactggtgacctcttggagagggaacctcaaaagccagtgggcctcggccggctgcggtggcacatgcctgtaatcccagcactttgggaggcttaggtggccagatcacctaaggttaggagttcaagaccagcctgaccaacatggtgaaaccctatctctactaaaaatacaaaaattagccgggcatggtggcgggtgcctataatcccactactagggaggctgaggcaagagaatcgcttgaacctgggaggcagaggttctagtgagctgagatcgcgccattgcactgcagcctgggtgacggagtgagattcggtctcaaaaaaaaagccagtgggcctgagatttttcccatttccaatgcaacaggtgggcccatctggggcagggaagagcacaattttgcgcctgctgtttcgcttctacgacatcagctctggctgcatccgaatagatgggcaggacatttcacaggtagggttgctctggagaagacggtggtttaggggtctacgtgtggaggaatgataagggctggctgtccagagagaggagatgtcacccttgcaaaaaaactagggccattctagcatgatataacctacagtcacacaagtcaagtagtcatgttaaggatttgtatggtgccataaaagctacagagggctgggcgttgctggctcatgctttcagtccatgctctttgggaggcttattcccgtgtctcacctgagtctccggattcatcagctgcttctgctcatcggtcacccccctctgccacgtccccctcgggttccataggcggctatcctccgatactacccccccactttcccctcccgcgtcgcttgccatgctccttgccgacccacagccctcacacccttccgcccccacctctgccaccccactctccccctcgccccaccccccccgcccccccccccacatccctttcgcccaaccccaccccccacacctttcccccaccccccgcccctccccccccctcccctctccccnnnnnnnnnnnnnnnnnnnnnnnnnnnnnnnnnnnnnnnnnnnnnnnnnnnnnnnnnnnnnnnnnnnnnnnnnnnnnnnnnnnnnnnnnnnnnnnnnnnncctgggtctcctcccctccttcctgccttgtgtatgctcaagccgttcctcctgggcactgtccccacctagaacagataccatgaattcaaatctcacaaaacacactttccagttctcaagcccaaacaaggctcttgtgtattcttgaggcctcagccagcagcctgcctccttccattgagggttttgagtggcaggagcagttttacctggaccctctctataggcaacgtcagcgctggatacatctaatgagagggccatccaggcttctctggccaaagtctgtgccaaccgcaccaccatcgtagtggcacacaggtacaggactacaggcctggggcggctggtgatgtggcccgctttgggtggggtagtaggcgactgatctttgacttctcaggctctcaactgtggtcaatgctgaccagatcctcgtcatcaaggatggctgcatcgtggagaggggacggtaagagacacatagatcaaaaggacaggtcttctgaattgggggctccaggaaagggggcatgaagtcccaggggcttctggaggggacctcccttcccatcccgtcctctctgtgggctggtggcaaggaccctcggggtaaaactaatggttaggactcacacttttctcctcaccccagacacgaggctctgttgtcccgaggtggggtgtatgctgacatgtggcagctgcagcagggacaggaagaaacctctgaagacactaagcctcagaccatggaacggtgacaaaagtttggccacttccctctcaaagactaacccagaagggaataagatgtgtctcctttccctggcttatttcatcctggtcttggggtatggtgctagctatggtaagggaaagggacctttccgaaaaacatcttttggggaaataaaaatgtggactgtgcgaggatcactgtggctttgtgggatggggtactgcagcgggcctctacccataagtcagatgagcattcttgacacggctttcctgtttgaggttagagaggagagagaaacacaccacttgtacgttttatcaactgccaagatcctttattttttccaggccccttcctgcccactccacatcggggcagctccagcataagggagatgacatgatgaaggggctaagagtagggcctggccagcatccactgagggcccaaccagggaacagttgctagccgctctcttccatgcagctggagcactagcaaggccttccagaggctcccagggcgacctccacatcactcccgcttgtctctgccctccagggtgctccgggcctcctctccctgtgtaccctagaggtgtgagggccacagtcctcctcaggtgaacctccctccccaagcccagggccctagcacaggctgcagttggacggcttcgagctgcggctctgggcctagagcaaagagaggggaaggaggggaagacacagtgcaacgtcaaggaaatgagggacagccctcatttcagagctcagcatgggctggagtcatactgaaaaccagacgataaccaccattccaaaactctgcaccactaggaagaacccccatccctgacttcttcctcccttccactgcagcatatatcttcagcccagcctcataccctgccgctggtattctgcctcactggctgacagtgcttgtctaaagctaggtcttcttcctcctgacaactgggagggagaaacagtttaagttggatgatggtaagatctgaaatttgaacatctgatctgtgtgtgttgggcctcatggtgctgagcactgctgaggattatctcaatcttcatagcaacactacaaggtgggtattagtattgtccccgttttatagaggaaatgaaggctccatgggttaaataacttgtcaaagatcatatagttcatcttaattttgagaccaagttgccagcgattatcttgcattgtgtcagagtggtcccacctacctgcctccagaccaagcccttgcccacagcttgcgctctctttcacaagagggtaaggtaccttggaacctggggtttggtttctgccagggacatttccagggcccgctgcagagcttcatcctcactctacaaagggagaaagaagaccagcgtccttggacttcactctctgtgtgtttgtttctgtccatccaacctctgcccaactcaccaggccattctgcaaagcaatcactggaggggctgtccaggacggagatcgggttgtggctctacgacagacattgaagaggtggaggtcagaggtgtgaaggggaaaaagggggagcagggaaacgggcaggcctacctgctgggagaggtacaggaaggcatggtttgacttgggctggggacagtgcttgtagaagccacagcttgtgctctggagatggcagcaagtctgtagggaagagagatttttggcatgtctccaagaactagccttacccaggaagtcaggaggggagttctggaaaaacatgcacttgaaaaggaagctaaaagactcccctagccgacagggtagggttgaagctccccaatttataacaacagagcttgagtcagttccaaaagaatgcttcccaaaagcaagtggaggacttggctgccattaccctgcccggctggttggtgcccctccccagagcaatcatggtccagtggatgccggtgcttgatgcagaagtttcggctacagcgttcacaggtcagtttcatcatttctcgtgccggcagccagcgcgttcacacttattggtgaagatctgaggtgaagtgagaaggttgtctctgctgagactctgattagctgtttgggtttccaggcatccgtagtcccagctgggttgtggctgaccccntacaatgtttaccttacgtttttgctgtgctggatcagagcgacagtctctgtcaatgtgctctcccacagcacggtcagggggctcccctctggccacaggcacaggcacattacagagagggcacacaggtacctggatatcctgtagtcaaggagcaagggtcagtctgtggcccactccagtccaacaaatctctggtcctgaaagaacttggatatgacccaccacaaacacgcaaaaaaacagtgtttcccagcactgacagcctcagaaggacaaaagggagaagaaacgtgagacacagatttgggggattctgcacgcattctccatctgcctgctttcaccctgaggatcgccccctcaccttttggtaagcagatccacagtgatgctgggcgtaggcacatggtctgcgcagaagatgcctgagcaggcatcacacttaagcggcagaaaatctgcaaagagttggtcggattgcaggtccagcgggactcgcatgtccttctctctcactcaagtcttccactcgggaaggaaaacgccaccctattttcgacacaccgccccttcccaagcccattatctccttggccaggccacctctgccgctgactaggcccgcctagcttcaagccccgcccgatggcacttgcagtctgggagcccagccttcgcttgcaacttgcggttcaaagtccctgtccgctgggccccgcgctcgcgcgctccgccctcacccaagcgctgacagctcggctccgaacagtgagcgccgaggtccggaaactccatcgccaagccgggcagggtctgctaggagaagcgacgagtgctgagcgtctttagggctcgtgctcgaagtccgcaccgganccccgcactctggcgacatccctgccccgcccattcctctcccccgcccagcccgggttacggaacccccgcgcc

SEQ ID NO: 2070 - protein, 891 aa, Homo sapiens [sequence omitted]

SEQ ID NO: 2071 - DNA, 13483 bp, Homo sapiens
  source (1)..(13483)
  CDS (201)..(444)
  CDS (1076)..(1125)
  CDS (1545)..(1747)
  CDS (1842)..(1962)
  CDS (2209)..(2389)
  CDS (2587)..(2676)
  CDS (2751)..(3181)
  CDS (3545)..(3619)
  CDS (4336)..(4399)
  CDS (4600)..(4759)
  CDS (5460)..(5612)
  CDS (6857)..(7020)
  CDS (7540)..(7841)
  CDS (10518)..(10730)
  CDS (11254)..(11325)
  CDS (12094)..(12186)
  CDS (12748)..(12828)
  CDS (13011)..(13283)
ctaccctgtgcctccacccctgcccttcctatgctccaaggcaggcagggaggcgggaggccaggtagctcaggaacccaaacctgtcgggcaggttttgagagctgtggagagagggacagaggctggagaaggatgtatggcctgccctgggcttgtctgttccctcctgagcctgagccccttaccttcctgaccccatgaagcacacactggctctgctggctcccctgctgggcctgggcctggggctggccctgagtcagctggctgcaggggccacagactgcaagttccttggcccggcagagcacctgacattcaccccagcagccagggcccggtggctggcccctcgagttcgtgcgccaggactcctggactccctctatggcaccgtgcgccgcttcctctcggtggtgcagctcaatcctttcccttcaggtgagtgtgcccctcccccatgagggcctcagcatttgggtccccagcccggcttcctctgtcccactctaccatgggatgtgcccaacctacaagcaggcacttgccatcttcctggggtagaaggcggaggatctggggagggctccagaacctgctgtgtgactgtgggtaagcctcacttcctctctgagcctcaggtgctctgtctgtaaagtgaggaggttacattggaaatacattagacctgactcagacatcctcttagtctatcggtgcttgggttgggtggtccaggagtgtctgaaggaccctcccagtcctgtcccttgctgcttgaggggaagaactgccaggccagaccccttctctgcctttgcccaggctcaggactgacctgtagggtccaggaggagaggtctgcagcctcctctctgctcgccctcctgtagcagtgctgaggtcagggcaggatggcacagggctgcggtgatgcagccttctgcgagggtgccatggtggtggcaggagccctgcctcagagccactttgccctggcagtggggagaggagggacacaggggcagggcagtggctgtccccaaatcctcagcttggctctttcccatagagttggtaaaggccctactgaatgagctggcctccgtgaaggtgaatgaggtgagcaagctggggaaaggtgctgggggagggagttctggggtgagcagcagggtgggagcagaaaagccttggctccccttagcccacctcgctgggtgtccactaggcaggggctcaggcatcctctcccctcctctgtgggcgctgcagtccgtagacctgggtgcaaaccacagctctgccatttactggcagtgaggtttgcagggagctggaacttcctgaacttcagcttcctcctgtgtaagatggtgatgagcagtaagaatgcggtcacctctgggacgggttccatgagatgcaggccatgcccctgacggcactcccgccccttctggtttccctctggactcaggcagaagccagggctgggcagtgggggtcgggtcacccctcatgccctgctgcctgcccaggtggtgcggtacgaggcgggctacgtggtatgcgctgtgatcgcgggcctctacctgctgctggtgcccactgccgggctttgcttctgctgctgccgctgccaccggcgctgcgggggacgagtgaagacagagcacaaggcgctggcctgtgagcgcgcggccctcatggtcttcctgctgctgaccaccctcttgctgctgtaaggcgctgcccagggcccgggtagggcgggctgtggcccccaggctccctcttacccagcaagcaccttcctcctccctccattcccacaggattggtgtggtctgtgcctttgtcaccaaccagcgcacgcatgaacagatgggccccagcatcgaggccatgcctgagaccctgctcagcctctggggcctggtctctgatgtcccccaagtgagcactgttacccctcaccctcatgtgcccctgtgagcactgggcccgggcaggacagagccgagtgggccctcgatggcccataaccagcgcatctgaaagccgcctcctctcccgcccttgcctgagagtcgaccaccctcagggtggatgccataggggcagggaaggggccagggagagaagggcgtaaggactgtgggtgaccaggaagggcagcctcagggccttgtgtttgcctaggagctgcaggccgtggcacagcaattctccctgccccaggagcaagtctcagaggagctggatggtgagggtctcggggactggcaggtgggctggctccttccagggcccctgctcgggtgcctcggtgggggcctctcactccctcattctggacacccccgggaacaggctggtagaggtggggatcaggccggctggagagcaagagtggccgccactcagctgctggaggaagaagccgtgtccccgctccttcactcccctccaccccccggctcctgcagagcccggtggggcctggggaggcaggatgggaatggggagggcccctccactcttggggtcccaccctgcagactgccctgtgctctgcaggtgttggtgtgagcattgggagcgcgatccacactcagctcaggagctccgtgtaccccttgctggcggccgtgggcagtttgggccagggtgagctggagccgcatcctggatagtgtggagcccagcgggtgtcctcctggggcgatcccacctgcacctagccctggatttcctgagccacctctgccccacctgtgacttccccatcgctgtaccccaggatccagcccccctcccctggcttaatgtgccctggggcagtttccactgtaggcaggaggtcaatgatttgcaggtccctttggctgggggaggggagttctgcctcctgcaaggcgtctggggatgcatatggtggaccctgctcaggctgggtgtgggtctctcagtcctgcaggtctccgtgcaccacctgcaaaccttgaatgctacagtggtagagctgcaggccgggcagcaggacctggagccagccatccgggaacaccgggaccgcctccttgagctgctgcaggaggccaggtgccagggagattgtgcaggggccctgagctgggcccgcaccctggagctgggtgctgacttcagccaggtgcagacccaggacagagtcctcttaaagccacggagggctagctgcctgctgctcctgggatctggcaaattcccagtccccttgccccaatgttcctcccttgctccacccacccagggttaatgcgggtcatcctggcagtgggtggagtgctccccaggccacgccctgtacgtgaacttcatgtgtgtgagctccttgagttcttgctgccaccaggggcagtaagagccatggcagtcctcattttacacttgaggacattggggttcagaggcccctgcccccctcatccaccctcagggatccccttcaggcctctccatgaactttgtcataacccaccttcccccatttcaggtgccctctgtggaccatgtcctgcaccagctaaaaggtgtccccgaggccaacttctccagcatggtccaggaggtgagagccacctggtctgcctgatttctccctcacctgccaagtgagggcctctgtttcccccttttgggcaggaacccagttgaacctaatatttggggtcccacccaccacacagcaccctgggcaggggactcccgacgaccatccttggtgtgcacacaatctgtgctcagatgggagagctgggcccttcaaggcggcaggcgtctgggggtggcaagggagcagtgctcagtctgagcccagagggcaggcggctcccctgggtggagatgggccaagggggaggatgcggtgttgtgagtcagcgcccaggacccaggacctggagctggggaaatgatgagtcagccatgctgggtggctggagtggaaggttccagaaggaaggaagtcagagctgaggctagaagggtggactggagctggaccttcaggagctagacctggcagttgtgtggagggcggctgagagttcactgcaatggtgggagagggatgggggtaggaagaagaggtccgggaggagcaacgttttgggaagttgagtcagactgggccaggggatgggagaggagggcagcgaccaagagaaaagagggaaactgggagcactgaggggggccctccctctaggcctggtgactttggggtctcccaagaggggacactgggcagagatggggaggcccagcactacttggttcctgcaggagaacagcaccttcaacgcccttccagccctggctgccatgcagacatccagcgtggtgcaaggttaggccacacgggtcagaggcagctgccaggcatggcttcccaccccacccctaccagggaggcttgttgagagaggactggggtggcgggggactgtcttccctctgtggttcccagatgttcttcctgcccgcttgtcttgttcctgggccccagggtgccctccgcatcccacaagtccctgttactttgggcagagctgaagaaggcagtggcccagcagccggaaggggtgaggacactggctgaagggttcccgggcttggaggcagcttcccgctgggcccaggcactgcaggaggtggaggagagcagccgcccctacctgcaggaggtgcagagatacgagacctacaggtgctgggcaccgcagggtgggatggggtggggtggggtgggcagcccagcctctatgccaccctgacaccctgagccccattcccagcctctatcagcccctgactgtactgagcctctgtgttttttgtttgtttgtttgtttttgtttttttcattttttttttttttgagacggtgtcttgctctgtcaccaggctggagtgcagtggggcgatcttgggtcactgcaacctctgcctccccggttcaagcgattctcttgcctcagcctcccaagtagctgggactacaggcgtgcgccaccacgcccagctaatttttgcatttttagtagagacagggtttcaccatgttggccaggattgtctctatctcttgaccttgtgatccaccagccttggcctcccaaagtgctgggattacaggccttagccaccgcgcccggccgcttctgcatatttttaagccaagacccctgactccagaggcctccaagtccctatgaggctgtgtgcccttggaacctgagcctggagaccacacaagagcagtagggcctcaggaagagtctgtatctgcatttctgaagccccagccttggggttagaggccacacccggtcgccacgtcccgcacctgtccatgttggtgccagccacctcctttcttagtgacacccatgtcctctctgtggcaggtggatcgtgggctgcgtgctgtgctccgtggtcctattcgtggtgctctgcaacctgctgggcctcaatctgggcatctggggcctgtctgccagggacgaccccagccacccagaagccaagggcgaggctggagcccgcttcctcatggcgtaagaaagggctgggagaggggaagggtcccctcttatagggctggctgattactctcgctcctgagcatagctcccggtgtggctgccagtgtcagtgtcatcatctgaataaaggggttgaaccagagcaggaatggccaacaaggagctcttccttcctacagcaggggcaactgtagcacctaatgggcactccttaccctgagtcagacacagcctagagtccctaccccagcttccaggcggcccccaccaccaataggcagcagcaccagaggtggaatctgtttgccaaccccagactagacggtctctaaggccaaggctgccacatacagttgtacaggctgttcactgaacaagagtacctggctaagggggtaagtgggggctgaaatccaccccatgttttactttccaagcctcacagcctgacatggggctgtgcctgcctcataagcccttcgagccccctggtctaagatctttactcctcagacctgctgggattctgccctgtcggcaggtcatgcctggtcatgccaggtgacccttttgagtgctgggtcctggagtaggtcacctccatgggccctaggcacagaagtgagcagtcttggctctttgggttttgtttgttttttgttttgtttgttgttgttgtgacagggtcttgctctgtcacccaggatggagtgcagtgacaccatcatggctcactatagcctcaccctcccaggctcaagcgattctcacacctcagcctcccaaacagttgggactacaggcgtgtgccaccacccccagctaatttttaaaattttgtagagacatggtctcacttattgccctggctggtctcatactcctggactcaagctatcctcccacctcaacctgtcctcccacctcaacctcccaaagtgctgggattataggtgtgagcccggatagtcctggctctttgaacaaaacagctgttttctcctctaggctgccagggccagccagggaaccaggaacagggtggggatgaggtgaaggtgaggccgggacagtcaggaatactgggttctccctcctctccaggaggccaagtcctccaagctcctttcctctaaaggctctgtgctggggccaactggctgagcaggctggccctggggtgagggtgggacagagggtatggtcagggcagccagtccctgctgtccctcagtcctgcctctcgcctaccccagaggtgtgggcctcagcttcctctttgctgcacccctcatcctcctggtgttcgccaccttcctggtgggtggcaacgtgcagacgctggtgtgccagagctgggagaacggcgagctctttgaggtaggcctgtctctgctcacaggccctcctggggagagaggtggggggcggtatcagcagagcaggagggttgggggaaagtgggggtcggggggtaaaagggagagagggaggggaggagtgagacagacatggccaaggaaagagacagaaacccgccagtggatggtggagggagagagcacccatgagtccctgagatgctgcccaggccccagggcagggaccctgagagatggcaccctgacccattccctctcatctcctaacactgtctgggagctgggaccctggtgcccggtgagctgcgatgctggactgggttctctgcagaagatcgggctgggcaaccctcctagggattcatgggaagagcccctgtaaggatttggggcccaggggtcaccagagttagaggccaggtgtgagctggggtgaggggatgtttcctacccctggtctgtgctgtgccacagcagcacagggccaggccctaggggaccagggtggccttgcccccaccccgctctgtgcccatttctcactgccccatccccagtttgcagacaccccagggaacctgcccccgtccatgaacctgtcgcaacttcttggcctgaggaagaacatcagcatccaccaagcctatcagtgagtggacagcctgggcagagctgggaccggggaaggaaggaggagggccggtgtccctcaggggacatcagcccccccgccacccccaaggctcatcgtctgcacccctcactcctcctcaggcagtgcaaggaaggggcagcgctctggacagtcctgcagctcaacgactcctacgacctggaggagcacctggatatcaaccaggtgagagaacgttttggaaactgtgaggagccctcctcagatccccctcctctggtctttttgcctctgtggaggcaccgtctctttgaacctaggagacctgagaagtctgtgtgagcgattaaggtgcccaagggcagaggcccagttatcagctctggggaaggttccgggtgtgtaggtgggtccgtgtgcacctgaaggctatgtccagccccaagcacagccaaggtggcagcaggaaaggctggtgacagtgagcaggaggatgagggggcccatgtgtcctgactgaggacaggcattggctgggatgctccacttgggagggggaggctggggaaggacgtggcagtgacaaggatggtggtgagtctggctaacgttggtggagggcctgccaagctcacgcaggtgggaggtggtggtggcaggattccatccccagcctgacaagcctcttcctgtaacctctggagttactggaacttggtgtgtagaactggagacacttgccaatgctggaaagagacagttctagaatgaaggcaaggaagggctgtttcacaagagggatggactttgagaatggggctctcctcatggtgcacagcagctggaagacattcactcctcgacttccacgctcctaagcatatgctggggaaacccacatcccctggccctggttcccctcgccctccccaaacacagagcatgctaactcctgattttgcatcgttctgggaaacccttccaacccctggatccaccaaccagcctcggcccacggacagcacagccggatggcccagccccaactctgtaccttgaactgcacaacctgggacagttatgcagctcactcctccttccgcatctttaaccagacaggagctccccgagcaggcgatatctcagtgctaggctgagacactgccctgtggaggaagcctggccagggagggatgaaccaggggcctgggcagaggagcccccatcctctactggcaggaagccatggctctcgaggggaggagtcctgggctctggtccttggcaggggagggtccagctcacaggagagtctggatagatagggctttggattcagatgcactgggcagtcctctgaggccacctgacaatgtaccaaatgtggctgtaagaatcctcgtcctcaaaggagacactgatgggtaggcagacatgagtaacacacagggctttccagagcacggggagggcaccagccacctttccacttctcctgaagctgctgccactgatgcctgagacacggcccgaaggcccccacccgagagggccaggccttttctcctccaggagaaggcagcctggagggatgcggggaggagagccaagctgggctgcagtctctaaccacctgtgtaacctcggcaagtggacgctccactctgacctcagtttcttatctgttaaacactgggctgacttttatgacctctaaatctcttccagtgatagtaggaaaatgctaaggctctttcctgaaaatacagtttcattcattcattcattcattcattcattcattcattcacacagctaacaaacttgtctcctgcccaccatgtgtgaccctccgagttagatgctgggggtttggggctgaataggcaggcaaagtcccactcttgtggagctgacagcattgaacaattaacccacaaataagatcatttcagagcaacaagtgctttgaaggcctcgacacagctgatgggataaagagcggctgagagagctattttatttcaggtggccagggaaggtctgtgtctctgcccagaagccagatgggcactggaggaaggccaggtcttggcatttggggcaggggcctactgggagcctgtctggggcttggggtgtccagggcagggggccctgagggcctgctgtgtgagtctgttcttgtgttgctataaaggaatacctgaggctggggcatggtggctcatgcctgtaatcccagtactttgggaagctgaggtggaaggattacttgagcctaggagttcaagaacagcctgggcaacatggggagaccctcctctacaattttttttaaaagccaggtgtggtttcttgcacctgtagtcccagctactcgagaggctgaggtggtagaatcactggagcccgggggatctaggcttcagtgagctgtgattgtgctattgccctccagcctgggcaacagagcaagaccctgtccgcttccccaaccaaaaaaaaaaaagcaatacctgaggctgcataatttataaagaaaagaggtttaagtgcaggctgtacaggaagcatggcaccggcagccgtttctggggaggcctcaggaagcttccactcatggccgaaggccaaggggagccagcacatcacatagggagagagggaacgagagagccaacgcagaggtgccacactctttcaaacacgtgaaataactgagcaaaactcactcatcacatggcaatggcactaagccatacgtgagggatccgcccccgtgatctagtacctcccaccaggcccaccttcacccccaacaccggggatcacattgcaacatgaaatttggaggggacaaatatccaaaccatatcgcctggtgacccctgtgcttaggggagcatctctggggtcctggctcagcaactgggcatgactcccaccctgcgcctgctctcccagtataccaacaagctacggcaggagttgcagagcctgaaagtagacacacagagcctggacctgctgagctcagccgcccgccgggacctggaggccctgcagagcagtgggcttcagcgcatccactaccccgacttcctcgttcaggtcagcggtgggcacctcagcagggcttcctcagcaggtggtgatggaacgaaggggcccacagaggagctgggtgtgcatcttgccttgtcccagctctggctcttccacatttcctggggcctcttcctgtggaggtgtccccagatcatgtgcccctgggcctgtcctcctgccaccaccccggtcacacaggaatggacaacctctcccccaacccaacagcatgtgttgctgttcatggtcctgaacccactgctgccgaggacgcattgggaagttgcctcttccttagttacaccagagggtgccttatttgttcttgttgtttctatctcactgggaaaatgtctgaaatatttcacagttccagggaaaactcactgtgactgatgtgtcacaatacacttagctggtgtaggttatatttgataagactggggatttggaggctgggatcaggtggtggtgggccccaggggagctgggttcatccctcctggcctcttctgtccacctgcagatccagaggcccgtggtgaagaccagcatggagcagctggcccaggagctgcaaggactggcccaggcccaagtgagtgggaaacagggccccgactgggcagcaggagccacagggggcttgggaggcgggaaagggtgggaggatgtgagggcaaaggcagggaactgaggacccccaccagtgaggcctgaggctcctgacccctggctgggctggagggttttgcagcatcagttctgactcaagctctgccacccgttggctgtgtggccttgggcaagacatgcagcatctctgagccggaggttcttcatctgttgggtggactgtcctccatctcagagcagatgaaatcacttctctggcctcacgcagttgggcaggtgtttctgtgtgtgccacttgtgggatttgctgggacaggtgctgtgaggacattgggatgaatgagatgtcatggcagttgcccttgaggggaaaaatagcattttgtatttataactatttagggtttaaaagttctctttgaaacatcccataggccccacaacaaccccacagggtgggcagagccagaagcatcctcaatttcagcaggtgcccctgcagctcaggcatgttctgtgactgacttaggggcacccagcaagctagagtgaacctagaatttggatctaggccccccaaaccaagatcaggccctggagcttaaggaggcctcagttttctgcctctgagcccagcactcccactttctcttggtatgtcagactgaaaggctgggtgacgggtagatgggtcctgggcggggccgttctgatttttgtatcctttcaggacaattctgtgctggggcagcggctgcaggaggaggcccaaggactcagaaaccttcaccaggagaaggtcgtcccccagcagagccttgtggtcagtttggaggcccggggagcctggggcctgggggaggggagacgtggagaggggacagtgaaaggggagggaagttctgagagtcccttccctcccctcctctcccctcctctcccctcctctcccctcctctcccctcccctcccctccactcccctccactttcctcccctctcctccctccccttcccttgcactcccctaaccagccctgatctcttctccacaggcaaagctcaacctcagcgtcagggccctggagtcctctgccccgaatctccaggtggctgctgttggtggggacgtatggtggagcacaggggctgcagaggcggggaggaagtaggagcccatctcactctgcacctcagagctctgcccaggttgcaggtggggttgggaggaagatgggggtggcagcagagcctgggggatcaccacccttggcttgtctgttggagctgaaccctctcctgctgagtgtgctgtggtgtgtgttgaattaatgaatggatgcgtgaatgtgggacactgagttgaggctctcgtcccctccagctggagacctcagatgtcctagccaatgtcacctacctgaaaggagagctgcctgcctgggcagccaggatcctgaggaatgtgagtggtgggtgggacagggaaggggcttccaccccaggcttctccagtcccagcttctcactgtggctcccaggaaagctgggcctgtcctcaagttgccaggcatggggggtggcgtgggtggggggcactgctgcttctgggacccctacagctcagacctcctttccttcctgcaggtgagtgagtgtttcctggcccgggagatgggctacttctcccagtacgtggcctgggtgagagaggaggtgagtggggcctcagaagcaatgactgattccctgctccatcggaccagctgttcaccctgctctgccccgcccccgcccccggagccccttgggggtgacccaggccttcaggatcaaacccaaactcccaaacctggcatctgcacccctgcttgctggctgagctctgtccaccccacctctgctgcagcgcttccctgagctgagtgtgagcagggttggcgttctccaaaatgtttcatcacacctggcctgcaggtccttccctgggctggccctttccccagcttgtccaaggccaatcctcaaagcccacctcccgatgcagacccttgctgaacacagcctctgcaagctgtctggatgcccacactagggcaacagtggtctggttttaccct

SEQ ID NO: 2072 - protein, 989 aa, Homo sapiens
MKHTLALLAPLLGLGLGLALSQLAAGATDCKFLGPAEHLTFTPAARARWLAPRVRAPGLLDSLYGTVRRFLSVVQLNPFPSELVKALLNELASVKVNEVVRYEAGYVVCAVIAGLYLLLVPTAGLCFCCCRCHRRCGGRVKTEHKALACERAALMVFLLLTTLLLLIGVVCAFVTNQRTHEQMGPSIEAMPETLLSLWGLVSDVPQELQAVAQQFSLPQEQVSEELDGEGLGDWQVGWLLPGPLLGCLGGGLSLPHSGHPREQAGRGVGVSIGSAIHTQLRSSVYPLLAAVGSLGQALDFLSHLCPTCDFPIAVPQDPAPLPWLNVPWGSFHCRQEVNDLQVPLAGGGEFCLLQGVWGCIWWTLLRLGVGLSVLQVSVHHLQTLNATVVELQAGQQDLEPAIREHRDRLLELLQEARCQGDCAGALSWARTLELGADFSQVPSVDHVLHQLKGVPEANFSSMVQEENSTFNALPALAAMQTSSVVQELKKAVAQQPEGVRTLAEGFPGLEAASRWAQALQEVEESSRPYLQEVQRYETYRWIVGCVLCSVVLFVVLCNLLGLNLGIWGLSARDDPSHPEAKGEAGARFLMAGVGLSFLFAAPLILLVFATFLVGGNVQTLVCQSWENGELFEVGLSLLTGPPGERVCRHPREPAPVHEPVATSWPEEEHQHPPSLSVSGQPGQSWDRGRKEEGRCPSGDISPPATPKAHRLHPSLLLRQCKEGAALWTVLQLNDSYDLEEHLDINQGSISGVLAQQLGMTPTLRLLSQYTNKLRQELQSLKVDTQSLDLLSSAARRDLEALQSSGLQRIHYPDFLVQIQRPVVKTSMEQLAQELQGLAQAQDNSVLGQRLQEEAQGLRNLHQEKVVPQQSLVLETSDVLANVTYLKGELPAWAARILRNVSECFLAREMGYFSQYVAWVREEVSGASEAMTDSLLHRTSCSPCSAPPPPPEPLGGDPGLQDQTQTPKPGICTPACWLSSVHPTSAAALP

SEQ ID NO: 2073 - DNA, 1387 bp, Homo sapiens
  source (1)..(1387)
  CDS (201)..(1187)
gttctgtgggaacacagccacatgcattccatcatgggttgtctgtggctgctttgcacagcagcagagttgagggctggaggcggaggcctgaagcattccatacctggcccctacaggacagtgccccaacccccacctactccaactctactgggacacagcaaggcccggagagagggaggggttcctgaggtcccatggagggggtcattggtgggccaagtctcctgcattgccatggctggaaccttggagtcctgagaagagctagctgtgggaaaactcattctgttccctcagcaggctctgtctatccagggaaaagaagtattcattctgacttttcacatgcagtgtcttgttccatccttacacatccctactttatgttttcctccatgcctgcgtggctctccttggttcatgtcagcatcatgtgtagaggacttgccttggttcacactggtgccatgtgtccagggctcactctggtttatgttgacactatgtgtagagcgttcactttggttcatgttggcaccatgtgtagagggctctctctggttcatgttggcaccatgtgtttagggctcatcctggttgatgttggcgccatatgtccggggctcaccctagttcatgttggcattttgtgtacagagctcaccctagttcatgttggcatcgtgtgtacagggctcactttggttcacattggtgccatgtgcacagggctctccctggttcatgttcccaggtggacagggctcaccctggttcatgttcccaggtggacagggctcaccctggttcatgttggcaccatgtgtacagggttcaccctggctgatgttggcgtcatttgtacagggctcaccctggttcatgttggcaccatgtgtacagggttcaccctggctgatgttggcatcatttgtacagggctcaccctggttcatgttattgccatgtggagagggcttgccctggttgatgttgccatgtgcatagggctccccctggttgatgttggtgtcatgtgtagaggactcccctggttcatgttggctccatgtttagtgggcttattctggttcatttggccccatgtgaaaagggctcaccccaggttaatgttggtcacatatagagagggcattctctctgtgtccacgataaagtaatggtggtggtgtctcccatttcccagaggaagctgagactcagctgaggaaagggcttggtcatagtctcaacgctggtccataatatggtcaggatttacaaccctgagcgtgatgtcatcttctcacacctgaaaccgtttagctaaccagaaatactctctcctaaggagataaagtgactttcattacatgtcttt

SEQ ID NO: 2074 - protein, 328 aa, Homo sapiens [sequence omitted]

SEQ ID NO: 2075 - DNA, 1348 bp, Homo sapiens
  source (1)..(1348)
  CDS (201)..(1148)
  modified_base (888): a, t, c, g, unknown or other
  modified_base (949)..(1048): a, t, c, g, unknown or other
agcatctacaatgtgccaattgataggctgactgtgacaaatctagtgacaagagaaaactcggtactaaagccagggcagatggaaaagctgtaactggagattgtacactagaacccaggagttcgagaccagcctgggcaacatggcaagaccctgtctctacaaaaaatacaaaaattagctggacatggtagtgcatgcctatagtcccaggtgctcaggaggctaatttgggaggaatgcctgagcccaggaggtccaaggctgccgcgcgctgttcctgcccctttttcccccgggcccttccctctcttcttgtgggttgcccctctcttccttttgttctgcgccccctcttgtcgccccccgtgccccctcgtcgggtgctgtctttccttctttcttccgttttgttctcctttcccccttccctcccttcccctcttcctcccttttttgtcccctctttctgtctctgttgttcctcttgttgccgtgtttggttcccctgtcgctgcttctgctgctgtcggttcgcgttgttcgctttctccgcgtgtcgtcttgttgttccgtgtttcctctctccttcctcccccgccttcggcccgctccctccgtctgcccctcgcttggttgcctttttggctggctccgcccccctcttgttttttctcccttttcccttctttcccgttcctgtttctctcggttgttctttttccttgtctctcctcttctttcggctgctgttccttttctttttctctgccttccccttccctttgcgctcctccctctcttcccgccgttcgccccttgttgctttgggttgtggcccgtcctccgttccccttctttcccttcttctttcctccctgtctngctgctccccgcggctgcgttcctcccctcttctctatgtacaacacgaagagaaaaaaannnnnnnnnnnnnnnnnnnnnnnnnnnnnnnnnnnnnnnnnnnnnnnnnnnnnnnnnnnnnnnnnnnnnnnnnnnnnnnnnnnnnnnnnnnnnnnnnnnnccggatggcaggaggttcacaccctaatccagctctttgggaggctgagttgggaggatcacttgagcccaggagttcgagaccagcctgggcaacatagtgagaccaccatctttacaaaaaataaaaaattgaggtgaacgtggtggctcgagccacctgcagtcccagctgcttgggaggctttttaggaggattgcttgagctgaggatgttgaggctgcaatgagctgtgattgtgtcactgaactccagcctgggtgacagagtggaaaaaaacttttttaatgctgcagtgag

SEQ ID NO: 2076 - protein, 315 aa, Homo sapiens
  MOD_RES (230): Variable amino acid
  MOD_RES (250)..(283): Variable amino acid
MPIVPGAQEANLGGMPEPRRSKAAARCSCPFFPRALPSLLVGCPSLPFVLRPLLSPPVPPRRVLSFLLSSVLFSFPPSLPSPLPPFFVPSFCLCCSSCCRVWFPCRCFCCCRFALFAFSACRLVVPCFLSPSSPAFGPLPPSAPRLVAFLAGSAPLLFFLPFPFFPVPVSLGCSFSLSLLFFRLLFLFFFSAFPFPLRSSLSSRRSPLVALGCGPSSVPLLSLLLSSLSXCSPRLRSSPLLYVQHEEKKXXXXXXXXXXXXXXXXXXXXXXXXXXXXXXXXXXRMAGGSHPNPALWEAELGGSLEPRSSRPAWAT

SEQ ID NO: 2077 - DNA, 2241 bp, Homo sapiens
  source (1)..(2241)
  CDS (202)..(699)
  CDS (752)..(2041)
acacactaacacacacgcaaagacagtgagggagcgagaggcgcatccccaggtagctgacaatgacacggccccgatccggacgcgggcttaaagccccccgacttccggagtgcccccctccccggcgacctccggagattaccgctggcgcatctctccgccctgcccggctccggcgccctcccctccccccgcagccgcagctccccgccccccgcgaacgcggctccccagtgtcctccagaacgcccgcgtggctgtcgggtttcgaaccccagggccgactctagtactcggcgcgcgcgccgccgcgtcgccgaccagcctgcggcccccgcatcaatcattaacggggcggcccgggctgcggcggcccgaggagggggatggtacggaactcgagacaggggacaactctatcccccgaagcggccgcgaaaccctagcctgggaggcccccgcccttcctcggtgcgcccgtccctccctccgcgcctcggctcgcacatccccacctcccgctccgggggcggcggcggcggaggcacccgcaccgcgcgatgcccagtcaccgctgccgcgctgccgccgcagtcagccgcgccgccgccgctgccgcagcgcgggcggccgcgcgccggtagcaggggcttggcgaggaagccgctgagcctcgcgcgctccgcgctcctggcggtcgcagcgctgcctattaattgattctcttattgatttatttaatttttaggagcggctgctcggaggcacgggtcttctcctaaacctgcagcgacgcccccggcgtgggcacaaaggctccgacggcggccggcgggggctgcccagcgcccgggagccggcgccagaggtcgcctgcgcgcgccctagccgagccccgggcaccatgccgcggcgcctgcagccccggggcgcgggcacaaaaggccctccggccccggccccggcagcttcgggggccgcccggaactcccactctgccgcctcccgggaccccccagcgtctgccaagccgctgctgcgctgggacgaggtgcccgacgacttcgtggagtgcttcatcctgtcgggctaccggcgtctgccgtgcacggcccaggagtgcctagcctcggtgctgaagcctaccaacgagacgctcaacttctggacgcacttcatcccgctgctgctgttcctgagcaagttctgccgtctgttcttcctgagcggcggcgacgtgcccttccaccacccgtggctgctaccgttgtggtgctacgcgtcgggagtgctgctgaccttcgccatgagctgcacggcgcacgtgttcagctgcctgtcgctgcgtctgcgcgccgccttcttctacctggactacgcgtccatcagctactacggcttcggcagcacggtggcctactactactacctgttgccaggcctcagcttgctggatgccagagtcatgactccatacttgcagcagcgcctgggctggcacgtggactgcacgcgccttatcgccgcctaccgcgccctggtgctgcctgtggccttcgtgctggcggtggcttgcactgtggcctgctgcaagagccgtaccgactggtgtacctacccgttcgcgctgcgcaccttcgtcttcgtcatgccgctcagcatggcctgccccattatgctcgagagctggctcttcgacctgcgtggggagaaccccacactcttcgtgcacttctaccgccgctacttctggctggtggtggccgccttcttcaacgtgagcaagatccccgagcgcatccagccgggtcttttcgacattatcggccacagccaccagctcttccacatcttcaccttcctcagcatctacgaccaggtgtactacgtagaagagggcctgcgccagttcctccaggcgccgcctgccgcacccactttctcgggtactgtgggctacatgctgctgctggtggtctgcctggggctggtaatcaggaagttcctaaacagctccgaattctgcagtaaaaagtgagcctccgccttggaggagactactggttcgcccatctgtttggagtttctgttgttgctattgttggtttgttttcaaatttcattgtgttttcttctttgctcaaggaaggtgctgcaaaaccatagggaaaaagttcactgctacaaagggatcccaacccactggaggctttgaagtagggaggttggcaggggtgg

SEQ ID NO: 2078 - protein, 595 aa, Homo sapiens
RSSPPPANAAPQCPPERPRGCRVSNPRADSSTRRARRRVADQPAAPASIINGAARAAAARGGGWYGTRDRGQLYPPKRPRNPSLGGPRPSSVRPSLPPRLGSHIPTSRSGGGGGGGTRTARCPVTAAALPPQSAAPPPLPQRGRPRAGSRGLARKPLSLARSALLAERLLGGTGLLLNLQRRPRRGHKGSDGGRRGLPSAREPAPEVACARPSRAPGTMPRRLQPRGAGTKGPPAPAPAASGAARNSHSAASRDPPASAKPLLRWDEVPDDFVECFILSGYRRLPCTAQECLASVLKPTNETLNFWTHFIPLLLFLSKFCRLFFLSGGDVPFHHPWLLPLWCYASGVLLTFAMSCTAHVFSCLSLRLRAAFFYLDYASISYYGFGSTVAYYYYLLPGLSLLDARVMTPYLQQRLGWHVDCTRLIAAYRALVLPVAFVLAVACTVACCKSRTDWCTYPFALRTFVFVMPLSMACPIMLESWLFDLRGENPTLFVHFYRRYFWLVVAAFFNVSKIPERIQPGLFDIIGHSHQLFHIFTFLSIYDQVYYVEEGLRQFLQAPPAAPTFSGTVGYMLLLVVCLGLVIRKFLNSSEFCSKK

SEQ ID NO: 2079 - DNA, 1663 bp, Homo sapiens
  source (1)..(1663)
  CDS (201)..(1463)
  modified_base (294): a, t, c, g, unknown or other
  modified_base (324)..(335): a, t, c, g, unknown or other
  modified_base (340)..(342): a, t, c, g, unknown or other
  modified_base (356): a, t, c, g, unknown or other
  modified_base (380): a, t, c, g, unknown or other
  modified_base (382)..(383): a, t, c, g, unknown or other
  modified_base (425)..(427): a, t, c, g, unknown or other
  modified_base (444)..(445): a, t, c, g, unknown or other
  modified_base (468): a, t, c, g, unknown or other
  modified_base (479): a, t, c, g, unknown or other
  modified_base (505): a, t, c, g, unknown or other
  modified_base (518)..(519): a, t, c, g, unknown or other
  modified_base (523): a, t, c, g, unknown or other
  modified_base (610): a, t, c, g, unknown or other
  modified_base (629): a, t, c, g, unknown or other
  modified_base (647): a, t, c, g, unknown or other
  modified_base (847): a, t, c, g, unknown or other
  modified_base (849)..(850): a, t, c, g, unknown or other
  modified_base (898): a, t, c, g, unknown or other
  modified_base (906): a, t, c, g, unknown or other
  modified_base (1079): a, t, c, g, unknown or other
  modified_base (1156): a, t, c, g, unknown or other
  modified_base (1229): a, t, c, g, unknown or other
  modified_base (1244): a, t, c, g, unknown or other
  modified_base (1271)..(1370): a, t, c, g, unknown or other
gaaaagattgtcagttagggatttggtgcctatcaatgatgagattttcaatgttttacagtgaaaaatataaaacttttttttggacaatttagggaggtgtttttttttttctcctacacaactaaataactataattacaagattgttttccccactaagattatgtcttttggtgttaaatatatttttaaatgagatgacattaatggtatttgctaggctattttgttcatgtctttacttggcaaaaataaatactggcaaccttatgctggttcaaaaaggtgtanggtgtgtgtgtgtgtgtgtgtgtgtgtgtnnnnnnnnnnnnaattnnnttttggtttggggnggttttttttttttgtttttggtntnntttttgtgttgtttgggttctttgcttttttgttttttttgnnntttctgtgtgtctttgnngttttgggtttgtgttttgtgtntcttttgtgtnggggtgggtttttctttttcttgggnggttttttttttnntctncctttttgcttttctctggtgtcttctctgtcctcccccctgttgcgttctcgtctcttcttctccgctctttttctattctctggntttgtgttgttctcttctnctcccccgcctctcctcntctttctctcctcttcttcccctgtgtcgggttctcctctctctctcctctcgttcttccttgtgggcgtggtgtcttcttttttttcctctttctcctctttctcgtgggtttttcttcttcccctccttgtctctcctttcgctgctcccttcctgcttcttctgcgtgttccctctctctcctcttcctcggggggncnntctgtgtttcctctctcttctgggggggggggcgccctttttctttcncccgctcnttttttcccctctccttcataacgtcctctttttcggctgtgggctcccttccttttcttgctcttttctcccgccctctttctccttcctcctttctgcttggtccctcgtcttttctcatttctctttctcctccgttgctcctccttctttcttcctggttcttgttccnccctctgcttgctcttttgtctctgtggtttctcttttcgcgttttgtctccttttttctttcgttccccccccttngtgcctttttctcctgtccttctcctacttacttgtgtgggggtgctcttcccttccttcctccttttttctnctcctgcctccttcnttctgtcgtctctccctctattcctcnnnnnnnnnnnnnnnnnnnnnnnnnnnnnnnnnnnnnnnnnnnnnnnnnnnnnnnnnnnnnnnnnnnnnnnnnnnnnnnnnnnnnnnnnnnnnnnnnnnncgggggggaaaaaaaccccccccggtgtgtacccctagtgtgtcccccgggttgaaaaaaaggggccacaccaaaaaatttcctattttgtaaaaaagggggtgcccacaaattttccggccccccgttttgggggggtttttaaaaaatgggcccccccggggttgttccccggggggtcaaaggggtttttttggcccctttgggttatcccaaaggggaaagttgtgggattaaaagggggggcggtttttattaagagtttttttattgttcaaaattgtttaaggaat

SEQ ID NO: 2080 - protein, 420 aa, Homo sapiens
  MOD_RES (32): Variable amino acid
  MOD_RES (42)..(45): Variable amino acid
  MOD_RES (47)..(48): Variable amino acid
  MOD_RES (52): Variable amino acid
  MOD_RES (60)..(61): Variable amino acid
  MOD_RES (75)..(76): Variable amino acid
  MOD_RES (82): Variable amino acid
  MOD_RES (90): Variable amino acid
  MOD_RES (93): Variable amino acid
  MOD_RES (102): Variable amino acid
  MOD_RES (106)..(108): Variable amino acid
  MOD_RES (137): Variable amino acid
  MOD_RES (143): Variable amino acid
  MOD_RES (149): Variable amino acid
  MOD_RES (216)..(217): Variable amino acid
  MOD_RES (233): Variable amino acid
  MOD_RES (236): Variable amino acid
  MOD_RES (293): Variable amino acid
  MOD_RES (319): Variable amino acid
  MOD_RES (343): Variable amino acid
  MOD_RES (348): Variable amino acid
  MOD_RES (357)..(390): Variable amino acid
MTLMVFARLFCSCLYLAKINTGNLMLVQKGVXCVCVCVCVCXXXXNXXLVWXGFFFLFLXXFLCCLGSLLFCFFXXFCVSLXFWVCVLCXFCXGVGFSFSWXVFFXXXLFAFLWCLLCPPPCCVLVSSSPLFFYSLXLCCSLXLPRLSXSFSPLLPLCRVLLSLSSRSSLWAWCLLFFPLSPLSRGFFFFPSLSLLSLLPSCFFCVFPLSPLPRGXXLCFLSLLGGGAPFFFXPLXFSPLLHNVLFFGCGLPSFSCSFLPPSFSFLLSAWSLVFSHFSFSSVAPPSFFLVLVXPSACSFVSVVSLFAFCLLFSFVPPPXCLFLLSFSYLLVWGCSSLPSSFFXLLPPXFCRLSLYSXXXXXXXXXXXXXXXXXXXXXXXXXXXXXXXXXXRGGKKPPPVCTPSVSPGLKKRGHTKKFPIL

SEQ ID NO: 2081 - DNA, 1321 bp, Homo sapiens
  source (1)..(1321)
  CDS (201)..(1121)
cactttctttctttcttcctttcttttttaaacaaaatggggatggaggctggaggagtccaggccagcactctgcaacctcagagacattagccctgggggggtcctccagggagtgcaaccatcagactgagccagccccagaccagctgcgcccaccccacccacttctgcacttgcggttccagcacggacaatggatgggggagtggggatgggggtggggctggcttttctttcttgtctgtctgttgggtggtgccgtcgctcgtgctcgtgcctgtgcgcggtgttcgctggcgtttcgcgtcctttgctgggtgttgttgcttctgtgttgctttatgcttttgctcggtgttctcttctggtgttcgtggtattctttgttgttgcgtgttgtatgttgtggtttttggtttgagtgtgtgttcttgtgttggcgttttcgtcttcctgtctgtttgtcgtctttcgtgtttgtctgtgtgtcttctttgtcgtgtgctgtgttgtccttgtttgcttgctgttctgtcttctattgctttggttgttgtctcgtgggttgtgtcctcttggatgctccttcatttctttcgtttgtgtctctttgttttgttgtgtttctctttcctgtgttttttgttcgtgttgctgggtgttgccttgtctttggagtgtgtgggttgctttgttctttgttgtgtttggtgttgttcatagctttgggggcttttggctgtgtctgtatacattttgtcactgtctgtctgtttattgcgtttctttcctgtttgacatttttgttcttttgtgtgttgtttcttttccaggggttggttgctgtgctggttctgtgcgtgtgtgccattcttgcgtgtcctgttgtttctgttcctcctcttttctcctcttgtttgtcatttggtcgtgttctcttgtctttgtttctttgtctttgttttttgttgttttttgtagttttgggttctggtcacaatagagtttcaagtgagcccgttgcacacctggcagccacaatgcaagatcggggtggaacgctggggaggacctctttcttccccaaggggcctgccactgagacccctgaattataactggaagcaaggaacatgtggggagaggagggaggtatctttgagaaaataggcactgtcctgatgaccctctcagctactccctccagaaccactcatgggggagggggcagaagttttttttatataggtgtatgtatatattttgtaagctctgagttgtcaatgagacattttctaccaagtatatatatatatat

SEQ ID NO: 2082 - protein, 306 aa, Homo sapiens
MGEWGWGWGWLFFLVCLLGGAVARARACARCSLAFRVLCWVLLLLCCFMLLLGVLFWCSWYSLLLRVVCCGFWFECVFLCWRFRLPVCLSSFVFVCVSSLSCAVLSLFACCSVFYCFGCCLVGCVLLDAPSFLSFVSLCFVVFLFPVFFVRVAGCCLVFGVCGLLCSLLCLVLFIALGAFGCVCIHFVTVCLFIAFLSCLTFLFFCVLFLFQGLVAVLVLCVCAILACPVVSVPPLFSSCLSFGRVLLSLFLCLCFLLFFVVLGSGHNRVSSEPVAHLAATMQDRGGTLGRTSFFPKGPATETPEL

SEQ ID NO: 2083 - DNA, 1225 bp, Homo sapiens
  source (1)..(1225)
  CDS (201)..(1025)
  modified_base (90)..(189): a, t, c, g, unknown or other
tggttctgttgttctctggggggggggaaaacaagaccgggaggacattttttgcggtgctccgggggaattatttttacacaagtgtcnnnnnnnnnnnnnnnnnnnnnnnnnnnnnnnnnnnnnnnnnnnnnnnnnnnnnnnnnnnnnnnnnnnnnnnnnnnnnnnnnnnnnnnnnnnnnnnnnnnngttatactgagatgcctctattctctgattctctactctctccgtatctccctcctcccttcgtgctcgctcttcgtcttcttcttctttctcctctctcttttctttctcttgctctatccacttcgtctccatctcttcgtgtgctctgcctatgctcctggtcaccctctgattgttctgactcgcctcctcttcctccacctctctctcgttcgctgtcctccccactctattctgcgctcgctcttcctctctacgctttcattcatactttgctgactcatttgcttgtcctctctttcctctttctctttcctgctcttctgcgtgtccactctgcgtacctccttccgtcgcttcttctagtctcgatctcacatctatgcacacgtcctcttctgactctcccaccgccctcctacctcttctacatctcgtgtcttcatgcctatctatgcccctccttcgtgctgctctttctgcctttaacgttcctcctgcctcctctggccctccgccctctcgcccttatccgtctctatcctcgttctccccgttccactctacccgttctgattcttctcgtcatacttctccacactcatctccttacagcctgccgtccccccgcccgatacccactcctaacaccaatccccacctctctgctgttactcctcacttactctaattatctaccacactctctgtcgtatttctacatccactctctcactctttacctccccccccacctacttctctctctctcttttcgacactatctactcatctcccgtcccatgtgtttcgtgtttatgttgatttgttagtgtgtgtctttttctttctgttcttgtttcttgatgtcaggttgtgtggtgattgtcttgtgttttgctaaggtggcgttgttgtcatcggttttttgttttcctttctagtttgtgcttttatttcgtgctcgatgctgttgatttggtctttagggaagatatgtggccgttgtagagttcgtatttaagagtgtgtt

SEQ ID NO: 2084 - protein, 274 aa, Homo sapiens
MPLFSDSLLSPYLPPPFVLALRLLLLSPLSFLSLALSTSSPSLRVLCLCSWSPSDCSDSPPLPPPLSRSLSSPLYSALALPLYAFIHTLLTHLLVLSFLFLFPALLRVHSAYLLPSLLLVSISHLCTRPLLTLPPPSYLFYISCLHAYLCPSFVLLFLPLTFLLPPLALRPLALIRLYPRSPRSTLPVLILLVILLHTHLLTACRPPARYPLLTPIPTSLLLLLTYSNYLPHSLSYFYIHSLTLYLPPHLLLSLSFRHYLLISRPMCFVFMLIC

SEQ ID NO: 2085 - DNA, 1417 bp, Homo sapiens
  source (1)..(1417)
  CDS (201)..(1217)
cctgggcctcattattgaaccactaccaacatgttcaaaaatagagagaggattagaaaccaaatccttccaacatttgcatctctagatgtagagctaagaattctgaaataaacaaatgcagtgaatttggaaatgatacatcaattgcttcctcctatgacatcaatactgggagttatcaagagtctgcccatcaaatgctagggagatgttttcctccagacaccaaagagaagcaacagctcagaatgactaaactctgcgatcctgcagaaagtgaattgtcgccatttctcatcaccttaattttagcagttttacttgctgaatacctcattggtatcattgcaaatggtttcatcatggctatacatgcagctgaatgggttcaaaataaggcagtttccacaagtggcaggatcctggttttcctgagtgtatccagaatagctctccaaagcctcatgatgttagaaattaccatcagctcaacctccctaagtttttattctgaagacgctgtatattatgcattcaaaataagttttatattcttaaatttttgtagcctgtggtttgctgcctggctcagtttcttctactttgtgaagattgccaatttctcctacccccttttcctcaaactgaggtggagaattactggattgataccctggcttctgtggctgtccgtgtttatttccttcagtcacagcatgttctgcatcaacatctgcactgtgtattgtaacaattctttccctatccactcctccaactccactaagaaaacatacttgtctgagatcaatgtggtcggtctggcttttttctttaacctggggattgtgactcctctgatcatgttcatcctgacagccaccctgctgatcctctctctcaagagacacaccctacacatgggaagcaatgccacagggtccaacgaccccagcatggaggctcacatgggggccatcaaagctatcagctactttctcattctctacattttcaatgcagttgctctgtttatctacctgtccaacatgtttgacatcaacagtctgtggaataatttgtgccagatcatcatggctgcctaccctgccagccactcaattctactgattcaagataaccctgggctgagaagagcctggaagcggcttcagcttcgacttcatctttacccaaaagagtggactctgtgaccagcacccaagaagaccacaggacctggccttaccagctctgccattccctcacctagacctctcttttctctcttcttttcttctccaaccctcatctgacccttttcgcctgatgtggctttttatataggaaattgatcatttcttttttgcttcatgggtacaatcttagtggtactgtcatattctttacctga

SEQ ID NO: 2086 - protein, 338 aa, Homo sapiens
MLGRCFPPDTKEKQQLRMTKLCDPAESELSPFLITLILAVLLAEYLIGIIANGFIMAIHAAEWVQNKAVSTSGRILVFLSVSRIALQSLMMLEITISSTSLSFYSEDAVYYAFKISFIFLNFCSLWFAAWLSFFYFVKIANFSYPLFLKLRWRITGLIPWLLWLSVFISFSHSMFCINICTVYCNNSFPIHSSNSTKKTYLSEINVVGLAFFFNLGIVTPLIMFILTATLLILSLKRHTLHMGSNATGSNDPSMEAHMGAIKAISYFLILYIFNAVALFIYLSNMFDINSLWNNLCQIIMAAYPASHSILLIQDNPGLRRAWKRLQLRLHLYPKEWTL

SEQ ID NO: 2087 - DNA, 1372 bp, Homo sapiens
  source (1)..(1372)
  CDS (201)..(1172)
gagacagacccagtaaccagatcctctcattatttgcatgtgaagcctctaacttgtagtcatgtgataaacaaatggagaaaaattggaaataaccattaatgagggcggcagaaattataacattgagcaagggtcagaagattgcagagcagttacccattcttggcgcagaaacctgaaagtcaggatcaaagagaatggcaacggtgaacacagatgccacagataaagacatatccaagttcaaggtcaccttcactttggtggtctccggaatagagtgcatcactggcatccttgggagtggcttcatcacggccatctatggggctgagtgggccaggggcaaaacactccccactggtgaccgcattatgttgatgctgagcttttccaggctcttgctacagatttggatgatgctggagaacattttcagtctgctattccgaattgtttataaccaaaactcagtgtatatcctcttcaaagtcatcactgtctttctgaaccattccaatctctggtttgctgcctggctcaaagtcttctattgtcttagaattgcaaacttcaatcatcctttgttcttcctgatgaagaggaaaatcatagtgctgatgccttggcttctcaggctgtcagtgttggtttccttaagcttcagctttcctctctcgagagatgtcttcaatgtgtatgtgaatagctccattcctatcccctcctccaactccacggagaagaagtacttctctgagaccaatatggtcaacctggtatttttctataacatggggatcttcgttcctctgatcatgttcatcctggcagccaccctgctgatcctctctctcaagagacacaccctacacatgggaagcaatgccacagggtccagggaccccagcatgaaggctcacataggggccatcaaagccaccagctactttctcatcctctacattttcaatgcaattgctctatttctttccacgtccaacatctttgacacttacagttcctggaatattttgtgcaagatcatcatggctgcctaccctgccggccactcagtacaactgatcttgggcaaccctgggctgagaagagcctggaagcggtttcagcaccaagttcctctttacctaaaagggcagactctgtgactggaactcacggagttctgcgggacctggtccaaccacttctgcctttgcctcaggtagaactctctcctcacccgtctcttctctcccaaacctgctctgacacttctcagataacgtgatccttttataaatatgaagctgaatttttaacttgagattctaaacagaagtaactaagaaacctgaagatggacttt

SEQ ID NO: 2088 - protein, 323 aa, Homo sapiens
MATVNTDATDKDISKFKVTFTLVVSGIECITGILGSGFITAIYGAEWARGKTLPTGDRIMLMLSFSRLLLQIWMMLENIFSLLFRIVYNQNSVYILFKVITVFLNHSNLWFAAWLKVFYCLRIANFNHPLFFLMKRKIIVLMPWLLRLSVLVSLSFSFPLSRDVFNVYVNSSIPIPSSNSTEKKYFSETNMVNLVFFYNMGIFVPLIMFILAATLLILSLKRHTLHMGSNATGSRDPSMKAHIGAIKATSYFLILYIFNAIALFLSTSNIFDTYSSWNILCKIIMAAYPAGHSVQLILGNPGLRRAWKRFQHQVPLYLKGQTL

SEQ ID NO: 2089 - DNA, 1909 bp, Homo sapiens
  source (1)..(1909)
  CDS (201)..(790)
  CDS (1025)..(1212)
  CDS (1270)..(1709)
gaagcatcaagcagaagaagcagctgcttggaagtgacaaacagaggaaagttctcgtccctcaggtcctggagtttgtgaatgttggggtccagtggtttgtaatgactagtggccttggtggacttggaaagctcaatgaaattcctttgtacctcctggcacagcacatggttcttggtcacaaagatctgatgtaaatgctccagctggtggggatgttctggtgcacatacttctgcagcttggccgtcccctgctggctccacaccggctcctcctgcgcaggcttcatactcctgctcatctatgctttctactgtttccacttcaatagaatcttcctcttcctcgtcctcttcctcctcctcttcctccccacctggactctcttttccgggttccacttccaaccttctcttcagccagacctgtttggccagcaatgggcttcctgcctgctcagctttttcccagtaaacgtggaatttcttccacaatctgtacaagcagcaggttgtcttcccagtgccacttcgcccaataaggatgatgggctccagtggcctgggattgaggtcgatcaccgcgtactcaagctcacccacccggaaggggtactccactgtggctgtcgtgtcattgaggatgttaaaggccatgttggtgctgaagctgtggaacttcatgatgttatattctgtctccactgcactggctgggggaaagtactcaggattgacatgctccctgcccttctcggcctctgtgtcctccacatagcagcgaggtatacgcttttgaattttcatgttagctgacacttggcctttattgatacctttcagcttcttccgcaggacacaggacaagccccggttgtaggcattgcagatggccttgatggaatcagccagtttgcagtgatctaagacgatgtcccaaatccggatgatttccgtgtagatccgccctgatttctccattgcacacgtgttctgctccgtggcaatgatcttctcagggttctcactgcatcgaggggagaagtcaatggcgagctcccagagcatccgggctcctttgtccagcttagcttcgaagagctggatgcttcctttcaggtgcttcagtcgcttctgcaggccctgggtccactcgccatttcccagctgctgaatggcaaggatgattttcttcttgatgaccttggtcattaccttactagacagcttcttcagcatttctgaagtgcactcgatctcccaggtcatgttatcgaagtcctggaggcaggcctcaatctcctgcgtgctccagtcatcctgatcatcattgccctccttccccctgttatcatcaggcacaagctgcaaggccccaaggcccacctgagcatgtccttcccccacctcactacagtcaggggcccctgcacccagagtcggcttgtcatctttctttccttctttgccagctcctgcctccagaggctcagagctctgaagacagtcctctgggaaagacggatccacttcaacctgctgaatcaaaactgtgatgtcctgcataaggcagtctctcagcgagcagggcctgagagctccaggctccttcctggtcacctgggtacctgggagagtctcccagctgtcagggactgcacttccttcaggcagtgttctggcagtggcaccacatggcactgacttgaatgaaccctgggacttgagctgagatgtgtgaccaggggcagtggactttgagagcttccccaggtgggcagcagagtcctgccggctcctcctcctgttctccatcagagctttgttccaggccaagagcagagagtcgttcttcttaatccggtgccgtgcatctttgccctctttgttcttcagattgaagt

SEQ ID NO: 2090 - protein, 405 aa, Homo sapiens
MLQLVGMFWCTYFCSLAVPCWLHTGSSCAGFILLLIYAFYCFHFNRIFLFLVLFLLLFLPTWTLFSGFHFQPSLQPDLFGQQWASCLLSFFPVNVEFLPQSVQAAGCLPSATSPNKDDGLQWPGIEVDHRVLKLTHPEGVLHCGCRVIEDVKGHVGAEAVELHDVIFCLHCTGWGKVLRIDMLPALLGLCVLHIAARVLTASRGEVNGELPEHPGSFVQLSFEELDASFQVLQSLLQALGPLAISQLLNGKDDFLLDDLGHVIEVLEAGLNLLRAPVILIIIALLPPVIIRHKLQGPKAHLSMSFPHLTTVRGPCTQSRLVIFLSFFASSCLQRLRALKTVLWERRIHFNLLNQNCDVLHKAVSQRAGPESSRLLPGHLGTWESLPAVRDCTSFRQCSGSGTTWH

SEQ ID NO: 2091 - DNA, 1702 bp, Homo sapiens
  source (1)..(1702)
  CDS (201)..(1502)
aagccttcatttccctctcacgtgtaatcaatagtttgaaggggcatagccagcattcgaggtccaagaatttcttcttagagtttgaaagcagcgctcccttcccttattgctgctgggaagcctgaagacatattctgattctcctaagctatcgtttacagtgttctcagtctccctgagttctgatcctcaaagggatggccctggaagtgggtaggctttccaccattgcgccgggcactgtagtttcttttcatctgcaaagtttgattcttcaggtcagaaacattttgaatattttatttcctccattttctttgttgaactcctcatatctgtgtgctgaggcctctttgaggaggttagctttgtttgtttgtttatttatttatttatttatttattttgagatggagtctcactctgtcacccaggctggagtgcagtggcatgatctctgctcactacaagctctgccttccgggttcaagctattctcctgcctcagcctcccgagtagctgggattacaggcacgtgccaccacgcccggctaatttttgtatttttagtagagacgggtttcaccatgttggccagcttggtctcaaactcctgacctcaagtgatcagcctgccttggcctcccaaagtgctgggattaacaggtgtgagccaccacgcccagccgaggttatctctttttctcacctattttctttgggattctctttgatattttttgttctacttcctgagaaatttcctcaaccgtatcttccaatctttgcagagatctttatttttgcaatcatgcttctaatttccatggtttccttagagtctccacgtgtttccttggctatgttttccatattctcttatctctatgcagatatccattatccgagttttgaaaacggtattccacctggcactgtagctaaaggttgcagcttcttttccttcctctttgcttgtttgcttgtttttgtcttggtcttttccacagcagggctgtccttgagtgtctggcattctgggctgtctgcttctatctcagcagctgcctggaatctctgtgtgcctgtggcagagtggggatgcgtgtcaaactgccagcttcccagttggatgctttggtggagcagtaccttttttttttttttttttttgagatggagtctcactgtcgcccaggctggagtgcagtggtgtaatcttggctcactgcaacttccacctcccatgttcaagccattctcctccctctcagcctcccgagtagctatgattctaggtgcatgccaccatgcctggataatttttgtgtttttagcaacgacagggtttcgccgtgttggccaggctggtctcaaactcctgaccactggtaatccgcccgccttggtctcccaaagtgctgggattacaggggtaagccaccgtgtctggccgatggagcagtatctcgagggacctccaagtgtccaaacctaggtcttttctctccagctggccagtttcccagtgagggggcctttaaccttccccggggtgtgggtgggttgggtgtgacctgttctcagttggctgcctgccgccaggtcttcctggggtcccggtccccgcagcctctcgcacaatccctggggaatgaacctcccgccttctgcagggctgggagagggatgcttgct

SEQ ID NO: 2092 - protein, 433 aa, Homo sapiens
MALEVGRLSTIAPGTVVSFHLQSLILQVRNILNILFPPFSLLNSSYLCAEASLRRLALFVCLFIYLFIYFEMESHSVTQAGVQWHDLCSLQALPSGFKLFSCLSLPSSWDYRHVPPRPANFCIFSRDGFHHVGQLGLKLLTSSDQPALASQSAGINRCEPPRPAEVISFSHLFSLGFSLIFFVLLPEKFPQPYLPIFAEIFIFAIMLLISMVSLESPRVSLAMFSIFSYLYADIHYPSFENGIPPGTVAKGCSFFSFLFACLLVFVLVFSTAGLSLSVWHSGLSASISAAAWNLCVPVAEWGCVSNCQLPSWMLWWSSTFFFFFFLRWSLTVAQAGVQWCNLGSLQLPPPMFKPFSSLSASRVAMILGACHHAWIIFVFLATTGFRRVGQAGLKLLTTGNPPALVSQSAGITGVSHRVWPMEQYLEGPPSVQT

SEQ ID NO: 2093 - DNA, 1621 bp, Homo sapiens
  source (1)..(1621)
  CDS (201)..(1421)
  modified_base (591): a, t, c, g, unknown or other
  modified_base (609): a, t, c, g, unknown or other
  modified_base (1319)..(1418): a, t, c, g, unknown or other
cacagttgatgagcctcttgcagggcacgcagaccccacaccttttcctcttcttcttggctgggttggctccgccagctccccctgaggaggacgaggaggaggaggaatgattctgcgggcagtctgccagattggcaatttgaaacgcactgtctgtgacggctgctgaggctgctgcgggggagtgaagggctgtcatgacgatgacccctggaggtaatgagatgccccctaaagccgggatagcggaaaaagtccccacgcgctcggggagattcattatctctgcttcagcagcgccgcatttgagcttgttcatgcattcccccgccaaaggtctgcagtgttcaggggataaggtggagaggaaattagtatttgccatttgcaacgacggctctggcgggcagccagctttccccagcctctgggagtcgtttcggtggtgcatgctggtcctgctgccgccgccgccgccgccgccgccaccgccggcggggaggatcgccgaggaggaggaggcggaggaggaggcggcggcggaggaggatttcctgcggggcccgccgtcggtgcgccctcttccgntgctgccgctgctgttgntattttttccttggaagcgcccgtcccctcgtgactccgactcccactcttcgtggtgtcctctctcttctttcctctttttccctccttcattggccttattctccttcctcttgtctcctttcttcttctctcctcttttcttctctctctttctctccgtctctcttcctttctttttctcttctctcccccccttcctcctctctctcgcctctctttctttccccctcgtcttctttctcctttccttttctatctctctccttctgcttctccttttcgctttctctgctcctctcttcccttttctttcctcctctcctttccttctttccgcctccctctttctccctccccctcctgcttctcctctctctccctccttcctccctccctcctctctcgcctctccctccttctttcttcctcttccttttctctcttccctctccccttctcctcctcttttcctctctcttctcttctccctcctcctctccctccttctcctccttctccttctttctttcttcctctctctcgtcttgcgctgcccttctttttgcttcttcttcttttctcttctgtttcttcctctctttctttttttttctcgtccgcgtcttttttttcttcttctatttttctttctctttctcttctcctcttccttctcctcctctcttctattctccttgttcttttcnnnnnnnnnnnnnnnnnnnnnnnnnnnnnnnnnnnnnnnnnnnnnnnnnnnnnnnnnnnnnnnnnnnnnnnnnnnnnnnnnnnnnnnnnnnnnnnnnnnntaaaccgagcccccacgcctagaaggcgggcatccccggccggccgacggcagaggaattagggcgcccgaccccccggtccaccggcgaggcggaaggccctcccgctaccacggggcaccccacacactacgcgaccccccagaattccctccagggaaacgtcccgaaatgcctcgggggaatcagcactaggggcgcgt

SEQ ID NO: 2094 - protein, 406 aa, Homo sapiens
  MOD_RES (131): Variable amino acid
  MOD_RES (137): Variable amino acid
  MOD_RES (373): Variable amino acid
  MOD_RES (406): Variable amino acid
MTMTPGGNEMPPKAGIAEKVPTRSGRFIISASAAPHLSLFMHSPAKGLQCSGDKVERKLVFAICNDGSGGQPAFPSLWESFRWCMLVLLPPPPPPPPPPAGRIAEEEEAEEEAAAEEDFLRGPPSVRPLPXLPLLLXFFPWKRPSPRDSDSHSSWCPLSSFLFFPPSLALFSFLLSPFFFSPLFFSLFLSVSLPFFFSSLPPFLLSLASLSFPLVFFLLSFSISLLLLLLFAFSAPLFPFLSSSPFLLSASLFLPPPPASPLSPSFLPPSSLASPSFFLPLPFLSSLSPSPPLFLSLLFSLLLSLLLLLLLLSFFLSLVLRCPSFCFFFFSLLFLPLFLFFSRPRLFFLLLFFFLFLFSSSFSSSLLFSLFFXXXXXXXXXXXXXXXXXXXXXXXXXXXXXXXXXX

SEQ ID NO: 2095 - DNA, 1930 bp, Homo sapiens
  source (1)..(1930)
  CDS (201)..(1730)
  modified_base (683)..(782): a, t, c, g, unknown or other
tgggcctgacccgggtgtccgcctcccagccccgggcttggcatagaattccgtccttaaaggtttcctggaggtgccagctgggctgcgtctctctgctcctgtctacagataaacacagatacaggacaagcacagatgttcacacacagacgagcgacacgcggacacgcacacacaaacacaagcaacacgcggacatgcacacacacagagcaacacgtggacatgcacacacacacagagcaacacgtggacatgcacacacacacagcaacacgtggacatgcacacacacacagagcaacacgcagacatgcacacacaaacacagagcaacacacagacatgcacacacacacagagcaacatgcagacatgcacacacacacacagagcaacacgcggacatgcacacacacacagagcaacatgcagacatgcacacacaagacagacacacgcggacatgcacacacacagagcaacgacgcggacatgcacacacaaacacagaccaacacgtggacatgcacacacacacacacagagcaacacgcggacatgcacacacacagagcaacacgcggacatgcacacacacggagcaacacgcggacatgcacacacagttacaaggacagacagaagaactggaggctgtggtgcctccactagtgccnnnnnnnnnnnnnnnnnnnnnnnnnnnnnnnnnnnnnnnnnnnnnnnnnnnnnnnnnnnnnnnnnnnnnnnnnnnnnnnnnnnnnnnnnnnnnnnnnnnngtgttgctctgtgtttgtgtgtgcatgtctgcgtgttgctctgtgtttgtgtgtgcatgtccgcgtgttgctctgtgtgtgtgcatgtccacgtgttgctctgtgtttgtgtgtgcatgtccgcgtgttgctctgtgtgtgtgcatgtccgcgtgttgctgtttgtgtgtgcatgtctgcgtgttgctctgtgtgtgtgtgcatgtccgcgtgttgctctgtgtgtgtgtgtgcatgtctgcatgttgctctgtgtgtgtgtgcatgtctgtgtgttgctctgtgtttgtgtgtgcatgtctgcgtgttgctctgtgtgtgtgtgcatgtccacgtgttgctctgtgtgtgtgcatgtcctcatgttgctctgtgtgtgtgtgcatgtccgcatgttgctctgtgtgtgtgcatgtccgcgtgttgcttgtgtttgtgtgtgcgtgtccgtgtgtcgctcgtctgtgtgtgaacatgtgtgcttgtcctgtatctgtgtttatctgtatacttccatgtctgtgtgacagagtccttgtgtctgtgtgtctacatgtctgcgcgtgtccctgtgtctttgtgtatatatatccatgcctgtgtgcctgtgttcctgcgtgtgcttgtgtgtgcacgtgtgcatttgtgtgtttgtcagagtatgtgtgcatgtgtgtgtctgtcagcgtatccatgtgtgcatgtgtgtgtctgtcagcgtatccgtgtgtgcatgtgtgtgtctgtcagcttaaccatgtgtgcatgtgtttgtcagtgtatccgtgtgtgcatctgtgtatctgtccatgtatccgcgtgtgcctgtgtgtacctttgtgtgagcatcaagggacctcccaggcctggtgctcaccgtccgccccaacgcaccctgcattgcagcgactccagctcggacacagacagcttctacggcgcagttgagcggcctgtggatatcagcctttccccgtaccccacggacaatgaaggtgaggtctttctccgcatccactgcccgttcgcctctccccacctggcctcctcttggccgctgtggaggagagggaggtgtgttcggctgtgctccttgctctggccctttggcagtgcgcagtagcatccctgggctctggccttcagcg

SEQ ID NO: 2096 - protein, 509 aa, Homo sapiens
  MOD_RES (161)..(194): Variable amino acid
MHTHRATRGHAHTHRATRGHAHTHSNTWTCTHTQSNTQTCTHKHRATHRHAHTHRATCRHAHTHTEQHADMHTHTEQHADMHTQDRHTRTCTHTEQRRGHAHTNTDQHVDMHTHTHRATRGHAHTQSNTRTCTHTEQHADMHTQLQGQTEELEAVVPPLVXXXXXXXXXXXXXXXXXXXXXXXXXXXXXXXXXXVLLCVCVCMSACCSVFVCACPRVALCVCMSTCCSVFVCACPRVALCVCMSACCCLCVHVCVLLCVCVHVRVLLCVCVCMSACCSVCVCMSVCCSVFVCACLRVALCVCACPRVALCVCMSSCCSVCVCMSACCSVCVHVRVLLVFVCACPCVARLCVNMCACPVSVFICILPCLCDRVLVSVCLHVCACPCVFVYIYPCLCACVPACACVCTCAFVCLSEYVCMCVSVSVSMCACVCLSAYPCVHVCVCQLNHVCMCLSVYPCVHLCICPCIRVCLCVPLCEHQGTSQAWCSPSAPTHPALQRLQLGHRQLLRRS

SEQ ID NO: 2097 - DNA, 1501 bp, Homo sapiens
  source (1)..(1501)
  CDS (201)..(1301)
  modified_base (1)..(6): a, t, c, g, unknown or other
  modified_base (1396)..(1495): a, t, c, g, unknown or other
nnnnnntgcgttttgtcgttttctcttcttgtttttctgctccttgtgtgtctcgtgttgtgttttggtctgtgtgttttcttggatcgctgttttttctttcttccggtactgtttatgtggttttgttttgtttctctctgtttgctgtttgtcttgttggtgtctgctttgtgttttgtattgtttctttttgtgttatgtttcttcagtctgttcttgttgttccccttcgtgtttttggttgtgtgtgtgtagtttgtgtgtgcctgctgtttgccatttggctgacgttgtgcctctggtttttgtgctggtccggtggttcttttgtcgttgttctgtggtttttcccattcgtgttttgctttgtccgtcttcttcgttgtgtgggtctgcttctttgtcttcattgtggtttgtggtgtttatttcctttctgtttgtttgatgttttttttttttcttattttgtcttctgtgtttctgctggtttcttgttctgtctcattctctggtccttggttgtctgtgttgttgtcccgttgttctgtttgttggttgttttgtttgattttgttcctgtctgttgttccatgtgtttcgcgctgtcctgtgattttcttcggttgttcgttgtctctgtttatccgtcgcattggcctgattctgtctggtccctgttgtgtgtttttcttgtgtgtgttctctgttgtgtcctgttgttgttgtttgtggtctcttggtttttgtctgtcttatctatgtgtgtttctgttgtgtctctttgtcttgtttgtattgtcttccactgtggtgttgtctgttggttgtttattcttttctgcgtgttactgttttgctctgtcatctgtttcttgtatttgtttgatcgtctctttgatatattgccctgttctgttcgttctctgtcattttctctgtttttctgtagggctctgtgttctgtcattgttctgtatttgttcatgtgtgatgtgtcgtttgtgttattgttccggtatatttttgtctgtctccttattgtattcttcattattctctgcctgtcttctctctcgtcgttctgtttgtgctcgattttcatgtgtattgtcttgtcgtggcattctgatcatgttttgttcctcgattctggtatatgtcgggtcatggtgatgtctgctatctgtctattgtatgtgatcgtgtatgcgtcattcgtcattgatggcaccccattggtctgtatcatctgttatgtctgttccggcgtcgtatgtttgtggtggtatttgtgatgtctggatgtttctatggtcatcatcatggatactgcgtatgatccatggagtacgaagtcgtgtaagtatctcgggagtccgtgagatgtcannnnnnnnnnnnnnnnnnnnnnnnnnnnnnnnnnnnnnnnnnnnnnnnnnnnnnnnnnnnnnnnnnnnnnnnnnnnnnnnnnnnnnnnnnnnnnnnnnnngctggc

SEQ ID NO: 2098 - protein, 366 aa, Homo sapiens
MFLQSVLVVPLRVFGCVCVVCVCLLFAIWLTLCLWFLCWSGGSFVVVLWFFPFVFCFVRLLRCVGLLLCLHCGLWCLFPFCLFDVFFFSYFVFCVSAGFLFCLILWSLVVCVVVPLFCLLVVLFDFVPVCCSMCFALSCDFLRLFVVSVYPSHWPDSVWSLLCVFLVCVLCCVLLLLFVVSWFLSVLSMCVSVVSLCLVCIVFHCGVVCWLFILFCVLLFCSVICFLYLFDRLFDILPCSVRSLSFSLFFCRALCSVIVLYLFMCDVSFVLLFRYIFVCLLIVFFIILCLSSLSSFCLCSIFMCIVLSWHSDHVLFLDSGICRVMVMSAICLLYVIVYASFVIDGTPLVCIICYVCSGVVCLWWYL

SEQ ID NO: 2099 - DNA, 1282 bp, Homo sapiens
  source (1)..(1282)
  CDS (201)..(1082)
tgtgttgtggtttgttgtttcgttccgttggtttggtggttgttttctcttccttttatttattgttgttgtgtgtgtgtttctggttgttggttagtctgtttcgtggttttagcttccttttttgtgtctttggtgtttgctcttgagttacggtgttggtgacctcgtgcctgttgtgttggctttgttgggtttggatgctgcctgcgtggtgtttgtgtcgtctttttccatctgttcgtgtattggtgttagtggtccactgttcgtgtgttgcgttttgtgggtgtgtgttgttgtttgttgttttgtgtgggtgtgtcgtcgtgcgtggttgtgtgttgtgtttgtgtggtcttgctttgatgttcggtatgtttgttctaatttgttgtgggtgtggtgtgtttctgttggtggtgtttggtgtccctggactgtgttggtggtctgtgctgtgtttgtatttgtgtaagtgtgtgttctctgttcgacgttccgtgttgggtgatcgttttgtttgttgttcgcttgtgtgtgtgtgttgttggtgttggaagctttttgttatggatgttcaccgtagttgtgtggttgtgttgggttgtgtcatgggaccgttctgtgtgtgcctcctgggtggtggtgttgggctattgtgttgttttaattttgtttttgttgttgtgtgtctgtgtgttgcttcactgagtcattgtgttcttggcacttcctgtgtcacaatttgtgtccgttccttgggtgttgttgttctggtgtatgtgtccgtgcgcgggtgtgggggtctggtgttcctgttgtgtgtcttgggtagttcggtcttgtatctagttggttgttgtgtattgtggttcctgtcgttgtgttgttttattttgtctctggtgtattgcgttgttttggtccttgttctctcccttaattgtaattccttgtctgtgttgtctctgggctctttgctgtgtccctcctctgtcgtgtcctgtgtttgtgtggtcatcctgtatgttttgtgcactcgttttttattgtggtcattggcgttgtggtctgtctgattcattaggtgttgtccatctctgactcattgtgtattattgtctgtgtgcattgttgattgctgcatatctgctatattgtgaattgtgtgatctgtttactgcgtgcattcctcatttgattggcatctctctcattgtgcatttgatcatcctgtattggtctgttcctgtgtctcggtatggtttcgttgtcggaa

SEQ ID NO: 2100 - protein, 293 aa, Homo sapiens
MLPAWCLCRLFPSVRVLVLVVHCSCVAFCGCVLLFVVLCGCVVVRGCVLCLCGLALMFGMFVLICCGCGVFLLVVFGVPGLCWWSVLCLYLCKCVFSVRRSVLGDRFVCCSLVCVCCWCWKLFVMDVHRSCVVVLGCVMGPFCVCLLGGGVGLLCCFNFVFVVVCLCVASLSHCVLGTSCVTICVRSLGVVVLVYVSVRGCGGLVFLLCVLGSSVLYLVGCCVLWFLSLCCFILSLVYCVVLVLVLSLNCNSLSVLSLGSLLCPSSVVSCVCVVILYVLCTRFLLWSLALWSV

SEQ ID NO: 2101 - DNA, 1402 bp, Homo sapiens
  source (1)..(1402)
  CDS (201)..(1202)
  modified_base (286)..(385): a, t, c, g, unknown or other
tctttgaggattctggtagctgtcctttaactctctgtgtccatgtgttcaattcttttgatttttagatcccacaaataagtagctgtcatttaactctctgtgtccatgtgttcaattgttttgatttttagatcccataaataagtgagaacatgtgatgtttgtctacctgtgccagtcttatttcacttaatataatgatcaccacttccatccatgttgttgcaaatgactggatcttattcttttttatggctatattgtattccattgtgtatatgtnnnnnnnnnnnnnnnnnnnnnnnnnnnnnnnnnnnnnnnnnnnnnnnnnnnnnnnnnnnnnnnnnnnnnnnnnnnnnnnnnnnnnnnnnnnnnnnnnnnntctctcttctctcttttgttgttcctccttccctgtcttcttttgttctctttcggtctctgcgtctctttttttctcgctgtctgtcccctttgttcttttcttctctctttgctttctctgcgtgtcttgcgccttgtcccccttgttccctttctctccgttctgtcttttttcttttccctctctttgctcttgcctctctctgctttttgttttgtttttttttttcgtctttcgttcttcttgtttttgttctgtttttgtcttttgctctttgttgttctctttcgtctctctctggtttcttctttgccgttcctttcttgctttgtgctcgcctcctgctctttctcttccttttgtcttcttccttctctctttctctctctgcttgtgtctttgtctcttcttttttcctgtgttgctttgtccctctctcttttctttgtttttcgcctgttgtatctcacttcactttctctctgctctttgtgctcagtcgcttgctgcgttgtcttcgttctttgtcgttgctttgtttatcgcgtctgcgtttgtctcgttccgtgtctgctgttgtgctttccttctctgtcctccctcccctcccctctgctctgctcctctctcctgcgttctctgccgtcctcggtctgctctctttctcttcctcttcttctccttcccgtctcctcctctctgtgaaaagaaagaaagaaaggaaggaagaaagaaagaaggaaaaaatgggagaaaatatgagtatgtttgcgcacagaatacgtgttttcatgtccagtgtctagcagggtgaatggtacacagtaggcatttgataaacatgaaggaaggcagggagggagattatcaactcaagttgtcccagaacccacgagttgctgaagtactgaccgtacttagggtacccagtagaaccacagctgactcgcactcaccgccaattaactggtaaagtttggaaaagcctaagttccttaaagccaagttcaaatc

SEQ ID NO: 2102 - protein, 333 aa, Homo sapiens
  MOD_RES (29)..(62): Variable amino acid
MITTSIHVVANDWILFFFMAILYSIVYMXXXXXXXXXXXXXXXXXXXXXXXXXXXXXXXXXXLSSLFCCSSFPVFFCSLSVSASLFFSLSVPFVLFFSLCFLCVSCALSPLFPFSPFCLFSFPSLCSCLSLLFVLFFFFVFRSSCFCSVFVFCSLLFSFVSLWFLLCRSFLALCSPPALSLPFVFFLLSFSLCLCLCLFFFPVLLCPSLFSLFFACCISLHFLSALCAQSLAALSSFFVVALFIASAFVSFRVCCCAFLLCPPSPPLCSAPLSCVLCRPRSALFLFLFFSFPSPPLCEKKERKEGRKKEGKNGRKYEYVCAQNTCFHVQCLAG

SEQ ID NO: 2103 - DNA, 1057 bp, Homo sapiens
  source (1)..(1057)
  CDS (201)..(857)
gaaatcggtgaaagaaactccatgtggcacagcccttgcctggcatgggggaggcggtctgttctgggcacctgagcgccccaagccatggtcctttgggtccctgatgccactctgagctcacagctcattatcaacctggcatctggcagccccgttcatggggaagaaattcaaagttaaatgtgaaggttgtgagaatggtcgctagtggagggatccacgcgaatcgacaactgatgctgtcattggccagggtgcctgaggcgggaggaatgccctgtgtctgtgtgtgcatgcgtgcccgtgcatgtgtttgcatgtgtgttctgtgcatgcatgcctgtgcatgtgtttgcatgtgtgttctgtgcatgcctacccgtgcatgtgtttgcatgtgtgttctgtgcatgcacacccatgcatgtgtttgcatgtgtgttctgtgcatgcacgcccatgcatgtgtgtgcatgcatgtccagcatgtgcgtgctcgtgtgtgcatgcctattcatgtttgtgtgttctgtgcatgcacacccatacatgtgtgtatgtgttctgtgcatgcacacctattcatgtgtgtgttccgtgcatgcatctccagcatgtgcatgcttgtgtgtgtacatgtatgcctattcatgtttgtgtattctgtgcatgcacacccatggatgtatatgcatgtgtgttctttgcatgcacacctatgcatgtgtgtgcgttctgtgcatgcacgcctattcatgtgtgtgttctatgcatgcatgtccagcatgtgtgtgtttgtgtgcatgcatgactattcatgtttctgtgttttgtgcgtgcacacctatgcataagtgtgtgtgttctgtgcatgcatacccatgcatgtatgtgcatgtgtgttctgtgcatgtacacatgtgtgtgtaaacaggaggccaccacgttattccaatggccccagccctctcttacaacccgcactggtgggagcagcaaccaggagatcacaagcaggggcagaaatgagccgagactcctggttcctcaagtc

SEQ ID NO: 2104 - protein, 218 aa, Homo sapiens [sequence omitted]

SEQ ID NO: 2105 - DNA, 1315 bp, Homo sapiens
  source (1)..(1315)
  CDS (201)..(1115)
ttactgaacatataagtggaataaacttgtttagtgacagaaggtcccctgtctggtttccagaattatggggtagatgctgttgctataggaggaccaaatgaaacagaactgaaaccgttccccactgtaataagcttgaaatcaaaagcagtattgcaatttctgggaattaattgaagacatggagttttcaaccaatggaaaagaataatggaaaaagactattgggtaatatggggttgttatcccccctaacaataatgctgccaattgcaaatttttcctctgttgtcgttcactgcacgggcacaggtcccttcatttcacgtcaacgtccagttcacttcacgtgtcacgttcagttcacattgcttcacatccactaccgttccgttcaattcacgtcccgtcaacgttcacattcgttgtcaatgttcattgttcatggtcacattcgttcatttgtctgttcgggtagtgttcacgttcatttcgtttcgtttctgttcattgtgttcgtttctttcacgttctcggttcgttcggttcgtgttctctctcgtctttgcgttcgttcatttagtgtcggtgcagtgttcatgttcatttcggtcgttctgttcgtgttctctgtctcgtcggttcatgttcattcatgttggttctttctttctttctttcgttctttgtttctttcgttctgttctttccttccttctttctttctttccttccttctttccttctttccttccttctttccttctttccttccttctttccttctttccttctttcttttttcatgcagtctcactttattgcccagactggagtgcaacggtgctatcttggctcactgcaacctccacctcctgggttcaagtgattctcctgactcatccttccaagtagctgggattacaagcatgcaccactacaccaggctaatttttctatttttaatagagacgacgtttcactatgttagtcaggctggtcttcaactcctaacttcaggtgatccacccaccttggcttcccaaattgctgggattacaggcatcagccaccatgcctggcctccattcaattatcttagatggctttagcagaaccatgatggaaaatgacagataaatataaacccttgtgtgcttaaccaggtggtagcttggttttgaaactgctatttctacatgtgagaccttaacttaaaaagtgtattgtagccattgtcactgggattttgggaatgcattttttggtctcattattcattaaaaagaaacacacatacacacacatacat

SEQ ID NO: 2106 - protein, 304 aa, Homo sapiens [sequence omitted]

SEQ ID NO: 2107 - DNA, 1750 bp, Homo sapiens
  source (1)..(1750)
  CDS (201)..(1550)
  modified_base (251)..(350): a, t, c, g, unknown or other
gggcgcccagctaacttgggaggctgaggcgggagaatggcgtgaagccgggaggcggagcttgcagtgagtggagatcgcaccactgcactccagcctgggcgacagagcaagactccgtctcaaaaaaaaaaaaaaaaaaaagaatggtcagatggatgatggatggaaacgggatggatgaatgatgaatcgcccagatgaataggggaatccttagagtgacctgcagcatgcaagctgcactgccnnnnnnnnnnnnnnnnnnnnnnnnnnnnnnnnnnnnnnnnnnnnnnnnnnnnnnnnnnnnnnnnnnnnnnnnnnnnnnnnnnnnnnnnnnnnnnnnnnnncttctggctcttggtttctggttctctttcgtcgttttgttctgcctttccgttctcgactcttcttctcctcttctcttcgtctccttctgctctttctctctcctgcgttcgcctctgtccgcgtgcgtgcgctcgtgggttcgttgtccccgctgtgtctctgtctccttcctttgttctcgtgggtcgttgtctgtctgtcttttctgtcttgggtgcgttcggtgccttcctcctcgtcgcttctcgcttctctgctttgtgtttttttttgtttctcttgttgatagcgcgtcttctcgtcgctttcttctctgtccttttgtttttgttttgcctgtttttttgtctttcctttgttgttgtccgttttcgcggtgtttttttttttctttttcttgtttttctcttttttctggttctttctgttctttttttttttgcctttgttcttttttctgctgtttcttgctgcgtgtgtttttctcgtgctgtgtttcccttctctgttctcctttttctttctttttcttctcgtgcttcgtctgcttcttgtcggtctgtgtctcctgcttgtgtggcttgtttgcttgtggcgtccttgttgttgtttgtggcgcttctcgtctctcgctctgccttcgcgttgtctggctcgtgcgcgtgtttgtcgtggtctcttcctcctctgctttccctttgttttgtgtgtttctttgtttttttcttgtctttgtgctctgctcctctgtgtcttgctgctgtgcttgcgggtggccctcttttccttgtttgtcttctgtgttctgcgtctgtcctgtttgggcgttcttgtgtgttttcgtcgtgttccttctcttgtttttgactgtggttctcgttgttttttctctttcttctttcttcgttgtcttttgttcgtctttctctttgtccttttgtcctcttctttctctctgtcctgttttctatctctttttcttttctgttggttgctcgactggaagtatggttggatggatggatggatggatggatgaatgggtgggtggaaggatgaatggatggatgggtggaagagtgggtggacaggtgaaaggtaagtggatgggtgaagggtggatggggagaggagtctgtaggagcttcctcctgaaggcaccgtgccaccaaaggaagcacctgcatcactgctgagcaggaccatccatcgcgcttgccaacccttttgcccatccacgctgcatggatggatggaagtatgggtggatgggagggtgggtgggtggatggatgaatgggtgggtggaaggatgaatggatggatgggtggaagagtgggtggacaggtgaaaggtaagtggatgggtgaagggtggatggggagaggagtctgt

SEQ ID NO: 2108 - protein, 449 aa, Homo sapiens
  MOD_RES (17)..(50): Variable amino acid
MNRGILRVTCSMQAALXXXXXXXXXXXXXXXXXXXXXXXXXXXXXXXXXXLLALGFWFSFVVLFCLSVLDSSSPLLFVSFCSFSLLRSPLSACVRSWVRCPRCVSVSFLCSRGSLSVCLFCLGCVRCLPPRRFSLLCFVFFFVSLVDSASSRRFLLCPFVFVLPVFLSFLCCCPFSRCFFFSFSCFSLFSGSFCSFFFCLCSFFCCFLLRVFFSCCVSLLCSPFSFFFFSCFVCFLSVCVSCLCGLFACGVLVVVCGASRLSLCLRVVWLVRVFVVVSSSSAFPLFCVFLCFFLVFVLCSSVSCCCACGWPSFPCLSSVFCVCPVWAFLCVFVVFLLLFLTVVLVVFSLSSFFVVFCSSFSLSFCPLLSLCPVFYLFFFSVGCSTGSMVGWMDGWMDEWVGGRMNGWMGGRVGGQVKGKWMGEGWMGRGVCRSFLLKAPCHQRKHLHHC

SEQ ID NO: 2109 - DNA, 1474 bp, Homo sapiens
  source (1)..(1474)
  CDS (201)..(1274)
aaatctattcaccactaaattaactttttaagttacatttttaatgcttttggatactggattattatttactttgtacttttgaggatttattttcaattttactaagtaaagtccctgtcctatttttttagtcatgtgtttggcaacaaaattatgaagtaagttgtcatggtaataagataaatactccgaagaggatgagccaagttagacttgttcctgtattgctgtggatattctgtattgttgttttgctgtgcatattctgcattgctgtggatattctgcgttgtcgtgttgctgtgggtattctgtattgctgtgggtattctgtattgctgtggatattctgtattgttgttttgctgtggatattctgtattgctgtgggtattctgtattgctgtggatattctgtattgttgtggatattctgtattgttgttttgctgtgcatattctgcattgctgtggatattctgcattgtcgtattgctgtgggtattctgtattgctgtggatattctgtattgctgtgggtattctgtattgctgtggatattctgtattgctgtggatattctgtattgctgtggatattctgtattgttgttttgctgtggatattctgtattgctgtggatattctgtattgctgtggatattctgtattgttgtggatattctgtattgctgtgggtattctgtattgttgttttgctgtggatattctgtattgctgtgggtattctatattgctgtggatattctgtattgttgtggatattctgtattgttgttttgctgtggatattctgtattgctgtgggtattctgtattgttgttttgctgtggatattctgtattgctgtggatattctgtattgctgtggatattctgtattgttgttttgctgtggatattctgttttgctgtggatattctgtattgctgtggatattctgtattgttgtatttctgtgcttattctatattactgtggatattctgtattgtggtattgttgtggatattctgtgttgctgtattgctgtggatattgagtgcagagtttaccttagcacatacagcagcccttccacaagtgactcgccctggggcacattcacccaagcaggctgtagagaatggttggttacatcctcccctggattgaaagacaccctccgagtggtgcttaccacacctcatggtgtagatattcgtcccttagttaaactcttccagactttctttcagtttgcctgaggtcaccaagctggcacctgggcagagaggtttaacattatcagcttcaaacaccggccctgccagcatcctcgtccaggcacctctgtctagcattgcaggcaccacctcacccgagggtgtgatgagcatcattcatcattcttccttttgctcatgtatttgctcattcaccacacctctagcgatacccaccatgt

SEQ ID NO: 2110 - protein, 357 aa, Homo sapiens
MSQVRLVPVLLWIFCIVVLLCIFCIAVDILRCRVAVGILYCCGYSVLLWIFCIVVLLWIFCIAVGILYCCGYSVLLWIFCIVVLLCIFCIAVDILHCRIAVGILYCCGYSVLLWVFCIAVDILYCCGYSVLLWIFCIVVLLWIFCIAVDILYCCGYSVLLWIFCIAVGILYCCFAVDILYCCGYSILLWIFCIVVDILYCCFAVDILYCCGYSVLLFCCGYSVLLWIFCIAVDILYCCFAVDILFCCGYSVLLWIFCIVVFLCLFYITVDILYCGIVVDILCCCIAVDIECRVYLSTYSSPSTSDSPWGTFTQAGCREWLVTSSPGLKDTLRVVLTTPHGVDIRPLVKLFQTFFQFA

SEQ ID NO: 2111 - DNA, 1333 bp, Homo sapiens
  source (1)..(1333)
  CDS (201)..(1133)
  modified_base (250)..(349): a, t, c, g, unknown or other
actagtatcggagatagaagtaagaataaatgttaccctgggctaggaaagtggggtgttattgactggagaaggtcatgagctaactttcagcaatgatgcgaacatagttattacgggtcttggaatcatagtgtgatggtcacatgaatatataaatattaaaacgtattaagctgtacacttaaaatttctggcacatgttaataacatatttaaaaacacttgtgatctcaataaacattgaaannnnnnnnnnnnnnnnnnnnnnnnnnnnnnnnnnnnnnnnnnnnnnnnnnnnnnnnnnnnnnnnnnnnnnnnnnnnnnnnnnnnnnnnnnnnnnnnnnnnctcctctctcctcccttcctcctctctcctccccctccccccccttctccctccttctctctctccctgccctccctcttccctctctcgcttccctctctctttctccttcccttccttgcctcctcccgtcctcccttccttcttcctcctccttcctctctcccctccgctggtccgtccctcctcctcctccgctcctccctccccccgcctcctctcgctccccctctcttctctcctttcttgcttcttcttcttttctctccctgtcgctctctctcttctcttttctcttcctcccctcctcttctgttctctcgtcttctctctccgcttcgctgcctctctcccctgtcttgctcgtctttcctctccttccttctctctccctctctcctttcttcgctcctctcttcgctcccgttgcctcccctccctccccttcctcctttcctcgctcgtctcccccccgcttttcgtcctttccttcttcgtctccttccctcctgtcgagctctcctccgactcttccctctccttcttctcatgttcgtttcattcgtcttttttttgttcactttttttttctttatatgatggctttcttctcatgtgtggtgtctcttttgcattgcctgtttctttgttttttttatccttatgtatctatccatgtccctgtcatgactttcaatgggttcctcaaatctccatctttgtcttttcctcttcttactctacatgttctgtctcggaggcattattccatcaattactatagccttcactacatcctagtatctcctaagtctccctgtcaacccagattccacccttctctgcctcaggtccataaagtccgtacccagctcagtaattgagacacaggggacagacatcagcgtggccaaaggaatgcaagaaggtggtaaagagaaatgccctttcaatgagtttcatatggatttccagcaatatagc

SEQ ID NO: 2112 - protein, 310 aa, Homo sapiens
  MOD_RES (17)..(50): Variable amino acid
MLITYLKTLVISINIEXXXXXXXXXXXXXXXXXXXXXXXXXXXXXXXXXXSSLLPSSSLLPLPPLLPPSLSPCPPSSLSRFPLSFSFPSLPPPVLPSFFLLLPLSPPLVRPSSSSAPPSPRLLSLPLSSLLSCFFFFSLPVALSLLFSLPPLLFCSLVFSLRFAASLPCLARLSSPSFSLPLSFLRSSLRSRCLPSLPFLLSSLVSPPLFVLSFFVSFPPVELSSDSSLSFFSCSFHSSFFCSLFFSLYDGFLLMCGVSFALPVSLFFLSLCIYPCPCHDFQWVPQISIFVFSSSYSTCSVSEALFHQLL

SEQ ID NO: 2113 - DNA, 1186 bp, Homo sapiens
  source (1)..(1186)
  CDS (201)..(986)
  modified_base (1)..(69): a, t, c, g, unknown or other
nnnnnnnnnnnnnnnnnnnnnnnnnnnnnnnnnnnnnnnnnnnnnnnnnnnnnnnnnnnnnnnnnnnnngctttttgtttgtttcttctttgttgtttgttacgtttttttttttgtcttctttttttgtttgctgttactctctttttgtttgatgcttgggtgctctcgttttttttcttattgtggtagttagtacgatgtatacattttttgtttgctttcgctttttgttcttgggttttcttttttgtttctgtgtgtctgttttcttgtgtcttttgtgtttattttcctggttgcttgtcagttttttgttcttttcttctgttcctttgttttgtgtcttctctccttctttgttcttctctttttgttctcccttttcttgttctttctcggctcttttcttttcttcttcttctcgttcgtctttctttctttgttctctctacctctgttccttcttttcgtttcgcttttctttgttttcttctctttcttcttgttcttcctcttctgctcgttcgtttgtcttgttgttttttgtgtttcttcttgtggccctcctctttcgtgcttctctctgtctcctctctttcctcttgccctttggctctctctgtttcgctctcttttcctctctcctctttttcgtcttctctcgtcgtctctcttttgctcttcctgctctgtcttccgtccttccgctctcttcgtcctctcgcgttctcccttgtgttgctcttcgttttttctctctccttgtcttcctgtcttctgtttttttctctgctgttgtgtccgtttctctttttttttttttcttgtatttcgctctctgtttcttctgtctcttttccctctctttctctctctctctttgttctctcccttccgtttttgtctcgttcttctcgtctcgtttcactttctgtcttttttctctttctcttcttttctcgttcctttttctttttgtgtgatttttgtggttcttttttgcgtctttctattgttttgttttttttttttttgttgtgtggtgttgttgtttctgttgttttttcgtgtctcttgttttcttcttttcgtttgttttgtgttgttttgttggtctgggtgtcttttcccttcctgcccatggtcatgcggttccttttgctttgtttgtttatttgttcgt

SEQ ID NO: 2114 - protein, 261 aa, Homo sapiens
MYTFFVCFRFLFLGFLFCFCVSVFLCLLCLFSWLLVSFLFFSSVPLFCVFSPSLFFSFCSPFSCSFSALFFSSSSRSSFFLCSLYLCSFFSFRFSLFSSLSSCSSSSARSFVLLFFVFLLVALLFRASLCLLSFLLPFGSLCFALFSSLLFFVFSRRLSFALPALSSVLPLSSSSRVLPCVALRFFSLLVFLSSVFFSAVVSVSLFFFFLYFALCFFCLFSLSFSLSLCSLPSVFVSFFSSRFTFCLFSLSLLFSFLFLFV

SEQ ID NO: 2115 - DNA, 1354 bp, Homo sapiens
  source (1)..(1354)
  CDS (201)..(1154)
caccagccccttactcttcaagccctgactgtggagttggtagatgcctctgatcctcagtattctctctggcaatgttccacggcttctccttcctgggagctggctccataacttgattttccccaaacgtgttgcaatccctgctgccccttagccacccagggtcttgtgtgggtatgagtgtagaggatgggggtatgccaggcctgggccgtcccaggcaggcccgctggaccctgatgctactcctatccactgccatgtacggtgcccatgccccattgctggcactgtgccatgtggacggccgagtgcccttccggccctcctcagccgtgctgctgactgagctgaccaagctactgttatgcgccttctcccttctggtaggctggcaagcatggccccaggggcccccaccctggcgccaggctgctcccttcgcactatcagccctgctctatggcgctaacaacaacctggtgatctatcttcagcgttacatggaccccagcacctaccaggtgctgagtaatctcaagattggaagcacagctgtgctctactgcctctgcctccggcaccgcctctctgtgcgtcaggggttagcgctgctgctgctgatggctgcgggagcctgctatgcagcagggggccttcaagttcccgggaacacccttcccagtccccctccagcagctgctgccagccccatgcccctgcatatcactccgctaggcctgctgctcctcattctgtactgcctcatctcaggcttgtcgtcagtgtacacagagctgctcatgaagcgacagcggctgcccctggcacttcagaacctcttcctctacacttttggtgtgcttctgaatctaggtctgcatgctggcggcggctctggcccaggcctcctggaaggtttctcaggatgggcagcactcgtggtgctgagccaggcactaaatggactgctcatgtctgctgtcatgaagcatggcagcagcatcacacgcctctttgtggtgtcctgctcgctggtggtcaacgccgtgctctcagcagtcctgctacggctgcagctcacagccgccttcttcctggccacattgctcattggcctggccatgcgcctgtactatggcagccgctagtccctgacaacttccaccctgattccggaccctgtagattgggcgccaccaccagatccccctcccaggccttcctccctctcccatcagcagccctgtaacaagtgccttgtgagaaaagctggagaagtgagggcagccaggttattctctggaggttggtggatgaaggggtacccctaggagatgtgaagtgtggg

SEQ ID NO: 2116 - protein, 317 aa, Homo sapiens [sequence omitted]

SEQ ID NO: 2117 - DNA, 1672 bp, Homo sapiens
  source (1)..(1672)
  CDS (201)..(1472)
caggatctcggctcactgcaacctccacctccggagttaatgtgattctcctgcctcagcctcacaggtagctgggattacaggtgcccactaccacaccctactaatttttgtgttttttagtagagacagggtttcatcatcttggcctccccaagtgctcgggttaccacacctggccacagtaagatgatcctttgatgagagaattggtcgtgtgttctctgcacttttttgtttggttcggttttcaaccaatgtcccccaccccctacccacccctgttttcacgttgcagatctaaaaacacatcattgcctttattcttattatttattttgctatcaaggaacaccagaccaagtactgagcacattctctcttgcactcattttgtgtgtgcttgcaggtgtgtgtgcttgcaggtatgtgtgcttgcaggtgtgtgcttgcaggtgtgtgtgcttgcagctgtgtgtgcttgcagctgtgtgtgcttgcaggtgtgtgtgcttgcaggtgtgtgcttgcaggtgcgtgtgcttgcaggtgtgcgtgcttgcagctgtgtgtgcttgcaggtgtgtgtgcttgctgctgtgcgcttgcagctgtgtgtgcttgcaggtgcgtgtgcttgcaggtgtgcatgcttgcagctgtgtgtgcttgcaggtgtgtgtgcttgctgctgtgtgcttgcagctgtgtgtgcttgcaggtgtgtgtgcttgctggtgtgtgcttgcagctgtgtgtgcttgcaggtgtgcgtgcttgcagctgtgtgtgcttgcaggtgcgtgtgcttgcagctgtgtgtgcttgcaggtgtgtgtgcttgcaggtgcgtgtgcttgcagctgtgtgtgcttgcagctgtgtgtgcttgcagctgtgtgtgcttgctggtgcgtgtgcttgcagctgtgtgtgcttgcaggtgtgtgtgcttgcagctgtgtgtgcttgcaggtgcgtgtgcttgcagctgtgcgtgcttgcagctgtgcgtgcttgcagctgtgtgtgcttgcaggtgtgtgtgcttgcaggtgcgtgtgcttgcagctgtgcgtgcttgcagctgtgcgtgcttgcagctgtgtgtgcttgcagctgtgtgtgcttgctggtgcgtgtgcttgcaggtgtgtgtgctagcaggtgtgtgtgcttgctggtgcgtgtgcttgctggtgcgtgtgcttgcaggtgcgtgtgcttgcaggtgtgtgtgcttgctggtgcgtgtgcttacgggtgtgtgtgcttgcaggtgtgtgtgtgcttgcaggtgtgtgtgtttgctggtgcgtgtgtttgcaggtgcatgtgctagctggtgcgtgtgtttgcaggtgcgtgtgcttgcaggtgtgtgtgactggcgtgttgttgtccacattttgagagggggaaaattatttttttctagtgtaatctcctttcaatttatttttctgttctgaaagaacaaaggaactattattaagttcaagtactaagaatactactgtccagattaagtaaagataatcagttagtttgggggatgggagaattagtcaactataccaagctgcagacatctaattattctgtgtcttcattctccccttcttccctttaggattataaccctctgaactgttgtagggctcttggccac

SEQ ID NO: 2118 - protein, 423 aa, Homo sapiens
MRELVVCSLHFFVWFGFQPMSPTPYPPLFSRCRSKNTSLPLFLLFILLSRNTRPSTEHILSCTHFVCACRCVCLQVCVLAGVCLQVCVLAAVCACSCVCLQVCVLAGVCLQVRVLAGVRACSCVCLQVCVLAAVRLQLCVLAGACACRCACLQLCVLAGVCACCCVLAAVCACRCVCLLVCACSCVCLQVCVLAAVCACRCVCLQLCVLAGVCACRCVCLQLCVLAAVCACSCVCLLVRVLAAVCACRCVCLQLCVLAGACACSCACLQLCVLAAVCACRCVCLQVRVLAAVRACSCACLQLCVLAAVCACWCVCLQVCVLAGVCACWCVCLLVRVLAGACACRCVCLLVRVLTGVCACRCVCACRCVCLLVRVFAGACASWCVCLQVRVLAGVCDWRVVVHILRGGKLFFSSVISFQFIFLF

SEQ ID NO: 2119 - DNA, 8192 bp, Homo sapiens
  source (1)..(8192)
  CDS (201)..(480)
  CDS (2252)..(2385)
  CDS (2891)..(3696)
  CDS (7824)..(7992)
cttccaggtgggccggcattgtgactgctgtagtaacttagttctgagatacctgctctgaagaatgacttatttacttccttcaaagaatgcagtgcaagtttattgggggtgggggacaaagagggctccacactcctgggaagcctgagaaacccttgttgctgggacatgcagccttgtttgacccttcatttgggatgagggtgggaggagccagaagccagaggaaagaactgagccagtgccctgatgggcccaattcctgccctgcccagggaaagggcaggttcctccaggttggccacggtctcagagctacaagggaggtactcacacaggcttcctgctgcaggtgctgcagggccctcttggctgggaggaggaagctggtgaggcagtgcagcccgtccccaccgtggcacctctcggccacgctgaacagctgccagagcaccgtggctgccgtggcttcaaacggtgggtacaaggcagagagcgtcctctggatacaggcatcaagagattccagatcctgaaatgaaagagagaattcagaaactttagggacataactcaagacaggtgcacaccacagtccaaggctggcactgaaggatccacacggaagtcccttgtcctgtgtctggcatgatgtgagttaactgagaaagacaaaatgtgcaggcgaatccatggtgcagggcgagctcctggtggttctccttgtgctgtcacacagcagaggggcaggtgcattaggcagacccgtggccctgtcctggggcaggggctctatataccacctctataaatgtgggctgccattcctataacactcacactgaggcacaaccaagcctagatttagggtaagtttcatcccctgcacctgaacagcataaggtctttggggtggggctgtgagtcctgcgggagctgctcctcccggctctcctgggtttgtacagggaggaggggacaaccacttgtggggaggacaaagctggcccacgcgccactttgttctcagaaaacaagctcatcccacagcaaatacattttaattgtgtcgatgattttgttttcatttaaacagtactgatggtgaaaaccttagggtgccctcctcaaggctgctgaattgtgcccatttggcaccctaaaaacaggatcattggccactgacttccgcttggcattttggtgcaacatgcttttatgaagaggcaatgattcttgtttaaaaatttgtaatgctgtttttagagtaacaatccctgaggaaataccacaaggctcatgtctgtagaaaagaactgcaaggcagtgaaagccaaagaagctaaaaattgtgaagtcagtttttataatggcacgacagttacatgagaaacacctctgaatagctaatcacacagataatttcctaaggaaattgaaaataaaacagggactcctctggcctgcagtgggagaagggtctgtcttgtcagctgggcctgtgactggaggtacctgcagcagagctcagcttctggaaactgcgtgactcagggaagctcagggctgggttcctgagtcctgtgtcccacagtagagcctcctgccggccctgccaccccatgggtcagctcccttccctgcacacactggctcgttctcactcacccgacagggccactcacttgttgacaggaatgatctaaatacagtctgagttcatgcagaaatgctatgtgatctaatttccaaaaactcaaatcacacctgagccacacagcaaacacatagtccatgagaatgagtgggcccgtctcaggccagggtcacacagtccatgagaatgagtgggcccgtctcaggccagggtcacacagtccatgagaatgagtgggcctgtctcaggccggggacagaatcacccacatcgggcaccaggatggctgtgctttaggatttggggcaaatgctcaattgacacaggagaaatgggcaggaaggaagaggaacatgatctaggagaggcatctcgaatggcctgttctgcacgagctgaaatgtcgacactgggccatctccggaagaggcctgttctgcaggagatgaaatgccgacactgggccatccccgggagagacgtattctgcaggagctgaaatgccgacactgggccatccccggaagagacgtcctcctacttctctgattcccaaatccaggcccattcctcccccaccctcaagtccagatgtggtcagcagcccagagctctgtccagggccaccttctccagggccaccgtctcaaccgcccgacataaggaaggagatggctggtgcactgcgctgtcaagccctgaccctacctctgcctgattccatggtgactggggcaggccccatgctccactcagtgggtcccacctgcaccacctccccaggatgactcccactggggccactcagggcctgggccaggccagagctgccccagggaagctgcctgcagactgagaattgggtaggttgaggtgctgagtaacccaagtgagccatgaaccaggtttattcatagcagccttcgaatgctcctgagtcctgtgtcctttgagggcggagtgtgtgctgtctcctggcctgatgtgtctgcagcatcccgattctggggagcacctttgggggtgccactagatgactgctcatgatgagggagctgcagtgtgtgtgcaggactccgaaggagtgtaagcctggccaggtgcagtgtacggacagaggaacccctgccagctgtgtccaggcctcggggccaggagagagagcagacacagggcaggggacctgcaagcacaggtccaccagctcagcccaatttcttgtctttgtagaactcaggattcttgtttctgccaaatgtacaaacgtgtgctgacttcaaacccgagggccttccagtttacgagatcatgagcctcactgagggacagacggtgcgggtgtgtgcacgtgttgcagattgtgtggatgtgtgcacgtttgttgcagagtggctggtgtgtgcacacgtgttgcattttgtatgtgtgcacgtgtgctgcagattgtgtgggtgcgtgcacgtgtgttgcagattgtgtggatgtgtgcacgtgtgttgccagagctggccggtgtgtgcacacgtgttgcagattgtgtggatgtgtgcgcgtgtgttgcagattgcgtgggtgtgtgcacgtgtgttgcagattgtgtggatgtgtgcatgtgtgttgcagagtggccagtgtgcacacgtgttgcagattgtgtggatgtgtgcacgtgtgttgcagattgtgtgggtgtgtgcacgtgtgttgcagattgtgtgggtgtgtgcacgtgtgttgcagattgtgtggatgtgtgcatgtgtgttgcagagtggccggtgtgtgcacgtgttgcagactgtgtgggtgcgtgcacgtgtgttgcagattgtgtgggtgtatgcatgtgtgttgcagattgtgtggatgtgtgcatgtgtgttgcagagtggccggtgtgtgcatgtgttgcagattgtatggatgtgtgcatgtgcgttgcagagtggccggtgtgtgcacgtgttgcagactggatgtgtgcacgtgtgttgcagactgtgtgggtgcgtgcacgtgtgttgcagattgtacaggtgtgtgcatgtgtgttgcagattgtgtgggtgtgtgcacgtgtcttgcagattgtgtgggtgtgtgcacgtgtgttacagattttgtgggtgtatgcatgtgtgttgcagagcaaccggtgtgtgcacgtgttgcagattgtgtgggtgtgtgcacgtgtgttgctgattgtgtggatgtgtgcatgtgtgttgcagagcaaccagtgtgtgcacgtgtgctgcagagcagctggtacagttccggtgcccgccagtcccttggcacttcgctgagctttgccctgaactctgtgcaatcacttagccaatggggcggtggcggtagagcaggaatggaagacggtgtccgaaaacccattttaaagcttcactcttcaatgaaggatttattttcccaattaactttaaaattttattgaaacgagggtaacattttaaagttaagatgcttgtttctcaccctatctgcactccctggctcgcagctccacgcccacaggggacacagcccagcccagcccagcttctgtgtcacccgtgggttagcgtgtccctctggcaccaacacatggtgatacccacaatgctgtagcccagggtgtggcacctgggggtgggtatgggaggtacttttaattcactgctgtggcctttgcctctggctggattttttttttttttttttttttttggagacagagtcttgccctgtcacccaggctggagtgcagtggtgtgatctaggctcactgcaacctccacctcccgggttcaagtgattctcctctctcagccttccgagtagctgggactacaggtgtgtaccaccactaaccgcgcctggctaattttgctattttcagtagagatggggtttcaccatgttggccaggctggtctcaaactctgacctcctgatttccctgcaaaaagcaagacatccgtgggcagcagacacccgtggctccttcaagcagggccctggggacagcgggggacccacactgtccctgctctgccccagttcccatcaatggccactttcttagcacagcagggtggtgaatgagaaagccaggtgtgaaacccacacccccaggaggctcgctctgggctgccacctggtcacagccattcaggcccatcaggacccagtgatggctcctggcgtctggcccaggtacccgtgcccatctctggtttcctgtctgtgcagtcagaaaccaccattgaatcaaaacctgtctaggaagcctcgtcccaaacagggcttggtgtgcaggtcggtctgtctacaccagccatctgcacccagtctgtctacaccagccatctgcacccagtctgtctacacccagccatctgcacccagtctgtctacaccagccatctgcactcagtctacaccagccatctgcacccagtctgtctacacccagccatctgcacccagtctgtctacaccagccatctgcacccagtctgtctacaccagccatctgcacccagtctgtctacacccagccatctgcacccagtctgtctacaccagccatctgcacccagtctgtctacaccagccatctgcaccgtctgtctacaccagccatctgcacccagtctgtctacaccagccctgctttccactcaggcttctgtgtattttggattcttgaccctctccgctggagatgctgaagacgcttctaaggctaaaagttccgttggcccgaagttggtacaacagggtgccaggaaggaaggacggcaagggggaaggaagggagtgtgccttgcctctctgggtttctgttctacgttctttgaagagttcagcaatcaccaaaagccacatcatccctggttcctaatgcactgactttatcacctgagtagatttagagagattcccaggtcctggtgaaaagcttcacccagcaaatgtcttactcccctgaaatggttttccgattcccataaccaacccaatccacaagggaagcccactggagacgcaggacctggtggcaggggatggctgggtgctccagagtctggggtcaagctggtagtctctgtttcgaggcctcctctcttctaattccctgagcctatgtggttactgtgccagaaaggtgctgctccactccaccacactctaattcctatatccctgaagcccaggtatacaaacctggcacacctggacccaagctggtgccccagccccacccggatcactgcattgggagctagtgggccaggtggtgatgctagctgctctctgatgagccccaccgaggtccagccagagctcctggccacaccagggcaagtgcagagaaagccttggctcagttcccctcctcactgacacatgcctaccaagccccagcccagggcaacccccgtcctccagggactcacagttcagggtgaggccagacccagggcggggatgggcaggtgggataccagagtgagccctcagcagcgccctgagtctaggccagcttcccggaagaagaggcatctgagcagcacctgagggtaagaaggtctcgctgcatgagcagatgggtaagggagcacccaagactctcccaggtgaaccttcaggcctagcagccccttcttcctcctaggaaggccagggctgtccaggcttgctggaggcctcaggggcaacgtcgtgcaacttacaatggcaggacagggtggagccagggcctgggtgcccaggatggggcccagagcagaggagagcagtggatcccagaagggccaagcatggggtctctggggtccagggtccctgacagcaaacatcaagtaggccctgtccagtgagccccaggggctgtgactgatgggtacatgtggccgcctcagcagggctggcacctcctccagcaggcagagatgggcaggacctggagcagctttacagttggctgagcattaataatgagccattatgcctaaccctaaagcccgagagaggtgggtctacatccacaagtcctgctggggcagcccctgaagctgcagattccagcctcttcccatgtctgcactgagcaggccttgccgggaaaagaatcggataagaactgcatcctgcatatgagtctccacatgtgggcacacatacagtacctagacacctgcgtgcgtgcacacacacgtacatacacgagaactgcgccctgcacctcatctctcaccacacacacgtgcacacacacacacagaagctgcacgtggcacctcaatatccctgtgggcacacacgtgcacacagaactcagaaactgcagctacactcctcctgtccctgcctgtgcagccaccctgggctccggctctcacgtcaacacctacgtctgctctcagccctcaccctgctgcagggggagccactcgtaaattcagcaatgcatggagcttgcagagtggggtcctgacaaaaacctctaactgaaatttgtttcaggttttgaaatgtgagcacgctgtggacaattacaagtgcagttctacatgttcgttaaatcggccaccaagtactgttggcagatttttctgccaaactaagaacaaaataccttgaaataaataaatatgcaagtattttaatataactctgcatttaggaaggtaatttctatcatgaaatctaaacagtaaaattttaatctgaggactggaaccttcttctgcaaaacaaagggctggatgggggagctgtcaggcccccggagacagactccaacctgcccagatgcctttcctggagcagcagtactcgtgctttcctcaaggaactgaaaataactaggaggagaaccacaatatgctatgcccagttctttcacactcaaaacaagggtcctcagaatttttacagtggtgaaggccctcaacaaaaagtgtgcaagactgatgttaaccacaatcagtcctgagctgggttctttatgctgaatatgaccttagctggaagtaagggtttgttcattccaaactatggctaggcagaaaagattacaccaatctaaaagaaaatttcctatagtcttaattataccaaatctaacttttctaccattgcgtccaattagggaaattgctgccttccatcaatacctggtcccacgacagagcaggacagagaggcggcgggtgcgtgctcggctcatgggcccccccagcttctacagctgccgtatgttacagttctgcaggagagcagttgataacaaccattctttcctgcttacgtcgtcttgaaaaccattaggtagaaaaaaaaagtcctcaaaatgtgtcggcttaattagatgtacagcttctcaggtctcaaagggaaaaatgcattcttgttcctccaagggtctgctggctttgctgctagcagcacggctgaatgaaaccagaataaaccaacttcaaacgaaaagcgaattcccttttgtctgaggccagctgct

SEQ ID NO: 2120 - protein, 462 aa, Homo sapiens
MRVGGARSQRKELSQCPDGPNSCPAQGKGRFLQVGHGLRATREVLTQASCCRCCRALLAGRRKLVRQCSPSPPWHLSATLNSCQSTVAAVASNDVVSSPELCPGPPSPGPPSQPPDIRKEMAGALRCQALTLPLPDSMNSGFLFLPNVQTCADFKPEGLPVYEIMSLTEGQTVRVCARVADCVDVCTFVAEWLVCAHVLHFVCVHVCCRLCGCVHVCCRLCGCVHVCCQSWPVCAHVLQIVWMCARVLQIAWVCARVLQIVWMCACVLQSGQCAHVLQIVWMCARVLQIVWVCARVLQIVWVCARVLQIVWMCACVLQSGRCVHVLQTVWVRARVLQIVWVYACVLQIVWMCACVLQSGRCVHVLQIVWMCACALQSGRCVHVLQTGCVHVCCRLCGCVHVCCRLYREIAAFHQYLVPRQSRTERRRVRARLMGPPSFYSCRMLQFCRRAVDNNHSFLLTSS

SEQ ID NO: 2121 - DNA, 2339 bp, Homo sapiens
  source (1)..(2339)
  CDS (201)..(1064)
  CDS (1789)..(2139)
  modified_base (18): a, t, c, g, unknown or other
  modified_base (37): a, t, c, g, unknown or other
  modified_base (42): a, t, c, g, unknown or other
  modified_base (46): a, t, c, g, unknown or other
  modified_base (70)..(71): a, t, c, g, unknown or other
  modified_base (108): a, t, c, g, unknown or other
  modified_base (113): a, t, c, g, unknown or other
  modified_base (140): a, t, c, g, unknown or other
  modified_base (143): a, t, c, g, unknown or other
  modified_base (162): a, t, c, g, unknown or other
  modified_base (175): a, t, c, g, unknown or other
  modified_base (187): a, t, c, g, unknown or other
  modified_base (190): a, t, c, g, unknown or other
  modified_base (224): a, t, c, g, unknown or other
  modified_base (246): a, t, c, g, unknown or other
  modified_base (248): a, t, c, g, unknown or other
  modified_base (250): a, t, c, g, unknown or other
  modified_base (265): a, t, c, g, unknown or other
  modified_base (267): a, t, c, g, unknown or other
  modified_base (269): a, t, c, g, unknown or other
  modified_base (288)..(289): a, t, c, g, unknown or other
  modified_base (291): a, t, c, g, unknown or other
  modified_base (304): a, t, c, g, unknown or other
  modified_base (312): a, t, c, g, unknown or other
  modified_base (323): a, t, c, g, unknown or other
  modified_base (330)..(331): a, t, c, g, unknown or other
  modified_base (337): a, t, c, g, unknown or other
  modified_base (349): a, t, c, g, unknown or other
  modified_base (359): a, t, c, g, unknown or other
  modified_base (372)..(373): a, t, c, g, unknown or other
  modified_base (375): a, t, c, g, unknown or other
  modified_base (377): a, t, c, g, unknown or other
  modified_base (408): a, t, c, g, unknown or other
  modified_base (417): a, t, c, g, unknown or other
  modified_base (420): a, t, c, g, unknown or other
  modified_base (425): a, t, c, g, unknown or other
  modified_base (442): a, t, c, g, unknown or other
  modified_base (453): a, t, c, g, unknown or other
  modified_base (457): a, t, c, g, unknown or other
  modified_base (463): a, t, c, g, unknown or other
  modified_base (467): a, t, c, g, unknown or other
  modified_base (483): a, t, c, g, unknown or other
  modified_base (490): a, t, c, g, unknown or other
  modified_base (494): a, t, c, g, unknown or other
  modified_base (500)..(501): a, t, c, g, unknown or other
  modified_base (507)..(508): a, t, c, g, unknown or other
  modified_base (511): a, t, c, g, unknown or other
  modified_base (513): a, t, c, g, unknown or other
  modified_base (518): a, t, c, g, unknown or other
  modified_base (527)..(528): a, t, c, g, unknown or other
  modified_base (534)..(536): a, t, c, g, unknown or other
  modified_base (548): a, t, c, g, unknown or other
  modified_base (551): a, t, c, g, unknown or other
  modified_base (557): a, t, c, g, unknown or other
  modified_base (560): a, t, c, g, unknown or other
  modified_base (564)..(566): a, t, c, g, unknown or other
  modified_base (582): a, t, c, g, unknown or other
  modified_base (585): a, t, c, g, unknown or other
  modified_base (588): a, t, c, g, unknown or other
  modified_base (598): a, t, c, g, unknown or other
  modified_base (605): a, t, c, g, unknown or other
  modified_base (607): a, t, c, g, unknown or other
  modified_base (616): a, t, c, g, unknown or other
  modified_base (624)..(625): a, t, c, g, unknown or other
  modified_base (633): a, t, c, g, unknown or other
  modified_base (637): a, t, c, g, unknown or other
  modified_base (641)..(642): a, t, c, g, unknown or other
  modified_base (649)..(651): a, t, c, g, unknown or other
  modified_base (660): a, t, c, g, unknown or other
  modified_base (667): a, t, c, g, unknown or other
  modified_base (675): a, t, c, g, unknown or other
  modified_base (685): a, t, c, g, unknown or other
  modified_base (687)..(688): a, t, c, g, unknown or other
  modified_base (692): a, t, c, g, unknown or other
  modified_base (704)..(705): a, t, c, g, unknown or other
  modified_base (709): a, t, c, g, unknown or other
  modified_base (717)..(718): a, t, c, g, unknown or other
  modified_base (720)..(721): a, t, c, g, unknown or other
  modified_base (724)..(725): a, t, c, g, unknown or other
  modified_base (727): a, t, c, g, unknown or other
  modified_base (734): a, t, c, g, unknown or other
  modified_base (739): a, t, c, g, unknown or other
  modified_base (749): a, t, c, g, unknown or other
  modified_base (752)..(753): a, t, c, g, unknown or other
  modified_base (756): a, t, c, g, unknown or other
  modified_base (761)..(765): a, t, c, g, unknown or other
  modified_base (776): a, t, c, g, unknown or other
  modified_base (780)..(781): a, t, c, g, unknown or other
  modified_base (795): a, t, c, g, unknown or other
  modified_base (797): a, t, c, g, unknown or other
  modified_base (803)..(805): a, t, c, g, unknown or other
  modified_base (811)..(813): a, t, c, g, unknown or other
  modified_base (815): a, t, c, g, unknown or other
  modified_base (821): a, t, c, g, unknown or other
  modified_base (824): a, t, c, g, unknown or other
  modified_base (830): a, t, c, g, unknown or other
  modified_base (832): a, t, c, g, unknown or other
  modified_base (834): a, t, c, g, unknown or other
  modified_base (837): a, t, c, g, unknown or other
  modified_base (840)..(841): a, t, c, g, unknown or other
  modified_base (846): a, t, c, g, unknown or other
  modified_base (848)..(849): a, t, c, g, unknown or other
  modified_base (853)..(854): a, t, c, g, unknown or other
  modified_base (857)..(859): a, t, c, g, unknown or other
  modified_base (863): a, t, c, g, unknown or other
  modified_base (881)..(883): a, t, c, g, unknown or other
  modified_base (886): a, t, c, g, unknown or other
  modified_base (891): a, t, c, g, unknown or other
  modified_base (893): a, t, c, g, unknown or other
  modified_base (911): a, t, c, g, unknown or other
  modified_base (915): a, t, c, g, unknown or other
  modified_base (923)..(925): a, t, c, g, unknown or other
  modified_base (927): a, t, c, g, unknown or other
  modified_base (932)..(933): a, t, c, g, unknown or other
  modified_base (936)..(938): a, t, c, g, unknown or other
  modified_base (941)..(942): a, t, c, g, unknown or other
  modified_base (952)..(954): a, t, c, g, unknown or other
  modified_base (958): a, t, c, g, unknown or other
  modified_base (964): a, t, c, g, unknown or other
  modified_base (968): a, t, c, g, unknown or other
  modified_base (970)..(971): a, t, c, g, unknown or other
  modified_base (978): a, t, c, g, unknown or other
  modified_base (994): a, t, c, g, unknown or other
  modified_base (1003): a, t, c, g, unknown or other
  modified_base (1006): a, t, c, g, unknown or other
  modified_base (1009): a, t, c, g, unknown or other
  modified_base (1011)..(1013): a, t, c, g, unknown or other
  modified_base (1018): a, t, c, g, unknown or other
  modified_base (1023): a, t, c, g, unknown or other
  modified_base (1028): a, t, c, g, unknown or other
  modified_base (1035): a, t, c, g, unknown or other
  modified_base (1038): a, t, c, g, unknown or other
  modified_base (1043): a, t, c, g, unknown or other
  modified_base (1045): a, t, c, g, unknown or other
  modified_base (1047): a, t, c, g, unknown or other
  modified_base (1051): a, t, c, g, unknown or other
  modified_base (1053): a, t, c, g, unknown or other
  modified_base (1056)..(1057): a, t, c, g, unknown or other
  modified_base (1071): a, t, c, g, unknown or other
  modified_base (1074)..(1076): a, t, c, g, unknown or other
  modified_base (1079)..(1080): a, t, c, g, unknown or other
  modified_base (1083): a, t, c, g, unknown or other
  modified_base (1088): a, t, c, g, unknown or other
  modified_base (1100): a, t, c, g, unknown or other
  modified_base (1106): a, t, c, g, unknown or other
  modified_base (1108): a, t, c, g, unknown or other
  modified_base (1112)..(1113): a, t, c, g, unknown or other
  modified_base (1116)..(1117): a, t, c, g, unknown or other
  modified_base (1121): a, t, c, g, unknown or other
  modified_base (1123): a, t, c, g, unknown or other
  modified_base (1126)..(1127): a, t, c, g, unknown or other
  modified_base (1129)..(1130): a, t, c, g, unknown or other
  modified_base (1132)..(1134): a, t, c, g, unknown or other
  modified_base (1136): a, t, c, g, unknown or other
  modified_base (1139): a, t, c, g, unknown or other
  modified_base (1142): a, t, c, g, unknown or other
  modified_base (1161)..(1163): a, t, c, g, unknown or other
  modified_base (1166): a, t, c, g, unknown or other
  modified_base (1169): a, t, c, g, unknown or other
  modified_base (1172): a, t, c, g, unknown or other
  modified_base (1196): a, t, c, g, unknown or other
  modified_base (1202)..(1203): a, t, c, g, unknown or other
  modified_base (1227): a, t, c, g, unknown or other
  modified_base (1242): a, t, c, g, unknown or other
  modified_base (1245): a, t, c, g, unknown or other
  modified_base (1251): a, t, c, g, unknown or other
  modified_base (1269): a, t, c, g, unknown or other
  modified_base (1271): a, t, c, g, unknown or other
  modified_base (1275): a, t, c, g, unknown or other
  modified_base (1279): a, t, c, g, unknown or other
  modified_base (1318)..(1319): a, t, c, g, unknown or other
  modified_base (1326): a, t, c, g, unknown or other
  modified_base (1329): a, t, c, g, unknown or other
  modified_base (1336): a, t, c, g, unknown or other
  modified_base (1421): a, t, c, g, unknown or other
  modified_base (1430): a, t, c, g, unknown or other
  modified_base (1439): a, t, c, g, unknown or other
  modified_base (1443): a, t, c, g, unknown or other
  modified_base (1448): a, t, c, g, unknown or other
  modified_base (1453): a, t, c, g, unknown or other
  modified_base (1459): a, t, c, g, unknown or other
  modified_base (1468): a, t, c, g, unknown or other
  modified_base (1481)..(1483): a, t, c, g, unknown or other
  modified_base (1486): a, t, c, g, unknown or other
  modified_base (1496): a, t, c, g, unknown or other
  modified_base (1498): a, t, c, g, unknown or other
  modified_base (1500): a, t, c, g, unknown or other
  modified_base (1517): a, t, c, g, unknown or other
  modified_base (1556): a, t, c, g, unknown or other
  modified_base (1558): a, t, c, g, unknown or other
  modified_base (1560)..(1561): a, t, c, g, unknown or other
  modified_base (1565): a, t, c, g, unknown or other
  modified_base (1569): a, t, c, g, unknown or other
  modified_base (1581): a, t, c, g, unknown or other
  modified_base (1590): a, t, c, g, unknown or other
  modified_base (1601): a, t, c, g, unknown or other
  modified_base (1607): a, t, c, g, unknown or other
  modified_base (1611): a, t, c, g, unknown or other
  modified_base (1614): a, t, c, g, unknown or other
  modified_base (1619)..(1620): a, t, c, g, unknown or other
  modified_base (1625): a, t, c, g, unknown or other
  modified_base (1630)..(1631): a, t, c, g, unknown or other
  modified_base (1636): a, t, c, g, unknown or other
  modified_base (1643): a, t, c, g, unknown or other
  modified_base (1659): a, t, c, g, unknown or other
  modified_base (1665): a, t, c, g, unknown or other
  modified_base (1669): a, t, c, g, unknown or other
  modified_base (1690): a, t, c, g, unknown or other
  modified_base (1701): a, t, c, g, unknown or other
  modified_base (1730): a, t, c, g, unknown or other
  modified_base (1756): a, t, c, g, unknown or other
  modified_base (1799): a, t, c, g, unknown or other
  modified_base (1820): a, t, c, g, unknown or other
  modified_base (1824): a, t, c, g, unknown or other
  modified_base (1836): a, t, c, g, unknown or other
  modified_base (1848): a, t, c, g, unknown or other
  modified_base (1860): a, t, c, g, unknown or other
  modified_base (1865): a, t, c, g, unknown or other
  modified_base (1868): a, t, c, g, unknown or other
  modified_base (1880): a, t, c, g, unknown or other
  modified_base (1887): a, t, c, g, unknown or other
  modified_base (1893): a, t, c, g, unknown or other
  modified_base (1908): a, t, c, g, unknown or other
  modified_base (1912): a, t, c, g, unknown or other
  modified_base (1916): a, t, c, g, unknown or other
  modified_base (1922): a, t, c, g, unknown or other
  modified_base (1927): a, t, c, g, unknown or other
  modified_base (1947): a, t, c, g, unknown or other
  modified_base (1957): a, t, c, g, unknown or other
  modified_base (1980): a, t, c, g, unknown or other
  modified_base (1997): a, t, c, g, unknown or other
  modified_base (1999): a, t, c, g, unknown or other
  modified_base (2026): a, t, c, g, unknown or other
  modified_base (2038): a, t, c, g, unknown or other
  modified_base (2056): a, t, c, g, unknown or other
  modified_base (2062): a, t, c, g, unknown or other
  modified_base (2097): a, t, c, g, unknown or other
  modified_base (2110): a, t, c, g, unknown or other
  modified_base (2115): a, t, c, g, unknown or other
  modified_base (2123): a, t, c, g, unknown or other
  modified_base (2153): a, t, c, g, unknown or other
  modified_base (2157): a, t, c, g, unknown or other
  modified_base (2205): a, t, c, g, unknown or other
  modified_base (2235): a, t, c, g, unknown or other
  modified_base (2246): a, t, c, g, unknown or other
  modified_base (2267): a, t, c, g, unknown or other
  modified_base (2270)..(2271): a, t, c, g, unknown or other
  modified_base (2281): a, t, c, g, unknown or other
  modified_base (2286): a, t, c, g, unknown or other
  modified_base (2294)..(2339): a, t, c, g, unknown or other
gctggcgactcggtctcncaaccctctctaattcttntaatngcgncccgggcggggttctgtccgggtnntgctccttctcgcttgggtgtgtgtgtgcgggtgtgngtgtnggttagtggcggggttggtggtcgctnggnttttcaaatcggcctggcncccactgttgcangggggtgcgccntcngctcttccgtatgcctggcgggtgctgtggggtntctgtgtctctgtcccgtcgcngncnctcgccgcgttctgngncnccgggggagttgcttcggnncnctcctccgcctgncgccccaangggggttcgnggtcctnnccccgncttgctcccctngtgccctccncgtggcttcctcnncngnttggttgtacctctttttgtccttcctccgntcctgcctntcncttgngtcttcgcccgtggtcngctccgggtgntcgnctcgcnccgncgggccgcttgccgcngggtcgncttnttcctnnttccgnnctngnggggntgggtgcgnngctgtnnntccgcgtccctnctnctctgntgntctnnnttggttgtttttctgncgngcnggggcgctcntctcgtngnttgtttggncggttcgnntccctttngggntggnngggggtnnnttcgtttgntgtggtntctggccnggctgccgcncnncctntttttttccttnncgcntcggcttnncnncgnntntttttcntgtcngtttcgtccngcnntgncttcnnnnntctgttttctnctcnnctttccccctgccntngtttgnnntcctgnnngnttctcnccnctcctncncnggncgnnttggncnngccnnccnnntgcnttgcgtgtcccgtctccnnnctntggcngncgttccccctttttccgntccntttttctnnncnggctnnggnnngtnngtccccccgnnncgtngcgctncccngnntgccccnccgcggtccccccttngttctttcntgnttncnnncctcncgccngcccntcctcgntgntggcngntnctcngntgnntcccgccgtgggtntgnnngtnnccncgcgntttcccccgggntgtgcngngccnncgnntgcntntgnncnncnnngnttnaantataataaaaaataaaatnnnctngtncgnggtcgggcccgctcgggccccccngggggnngcgggggggggggggggggcgcgntgtggccctgtgggnctncttcgncgctggtttctctctctncngcgntctncctccgcgctccccccctccctctcgctccccccgtctnnctcctcntcncgctctnaataaaaaaaaaaaaaaaaaaaatcccctccccgcccccccccccctctgcgggggggggggggggggggcgcgttctcgtctcntctcgctgnctcctggcncgtnccccngctcncttctntgtgtcgcntcccctcctctcnnnctngcgtcccctntntncggccgccgggctgtcntcccccgttttgtttgtctcttcttgctggtctcccgcngntnnctcncttngtggggtccttngcctgtctncgctccccttncctgcncgcncgncgttnncctcntgtcnntctcncgctctngccgtcctgctttgcnttgctntgcncggctctctctcgcgtttgcntcctttctgtngcgctgtctgtggctgccgtcttctgcgnggtctcgtttctctttgtccgtcccntgctttgcgtcgtctttcttttcgctgcgtaggtcgtgcttgntctctctgtgtgctttctcgnctcngttttgggtctnccttcttcttcncttttctctgtntttcngcnctgttcttgctntgtcgtnctgctntccgcgtgctgcttncttntcgntgcgcngttcntgttctcttgcggcgtgctnttgttctctngtccctccgctccttgtgtcggngcgtctgtgttctcncngcgctcgttccgtcgtcgttctgctcgcntggtcgtgggcnttccgcctgcgcctcgcncgcgtngcaagcctcacctaactaacgccgcctgctgcgtngctncttgctctngcgtngactacangtcgagcatgctataagtacccaacttacntctngtgcactaacaatgatacagaagcactacagtgacgacgttaaataantcacgagctagattagataaacataaaaangaagtaaaaantaagattaaagaagaaaaaanatnnaaaaaaaaanaaaanaaaaaaannnnnnnnnnnnnnnnnnnnnnnnnnnnnnnnnnnnnnnnnnnnnn

SEQ ID NO: 2122 - protein, 404 aa, Homo sapiens
  MOD_RES (8): Variable amino acid
  MOD_RES (16)..(17): Variable amino acid
  MOD_RES (22)..(23): Variable amino acid
  MOD_RES (30)..(31): Variable amino acid
  MOD_RES (35): Variable amino acid
  MOD_RES (38): Variable amino acid
  MOD_RES (41): Variable amino acid
  MOD_RES (44): Variable amino acid
  MOD_RES (46): Variable amino acid
  MOD_RES (50): Variable amino acid
  MOD_RES (53): Variable amino acid
  MOD_RES (58)..(59): Variable amino acid
  MOD_RES (70): Variable amino acid
  MOD_RES (73)..(75): Variable amino acid
  MOD_RES (81): Variable amino acid
  MOD_RES (85)..(86): Variable amino acid
  MOD_RES (88)..(89): Variable amino acid
  MOD_RES (95): Variable amino acid
  MOD_RES (97)..(98): Variable amino acid
  MOD_RES (100)..(101): Variable amino acid
  MOD_RES (103)..(106): Variable amino acid
  MOD_RES (109)..(110): Variable amino acid
  MOD_RES (112): Variable amino acid
  MOD_RES (116)..(117): Variable amino acid
  MOD_RES (119)..(120): Variable amino acid
  MOD_RES (122): Variable amino acid
  MOD_RES (128)..(130): Variable amino acid
  MOD_RES (133): Variable amino acid
  MOD_RES (135)..(136): Variable amino acid
  MOD_RES (139): Variable amino acid
  MOD_RES (142): Variable amino acid
  MOD_RES (145)..(148): Variable amino acid
  MOD_RES (150)..(151): Variable amino acid
  MOD_RES (154): Variable amino acid
  MOD_RES (156): Variable amino acid
  MOD_RES (159): Variable amino acid
  MOD_RES (162)..(164): Variable amino acid
  MOD_RES (168)..(170): Variable amino acid
  MOD_RES (173)..(176): Variable amino acid
  MOD_RES (178): Variable amino acid
  MOD_RES (180): Variable amino acid
  MOD_RES (183)..(189): Variable amino acid
  MOD_RES (192): Variable amino acid
  MOD_RES (194): Variable amino acid
  MOD_RES (199): Variable amino acid
  MOD_RES (201)..(202): Variable amino acid
  MOD_RES (204)..(205): Variable amino acid
  MOD_RES (207)..(208): Variable amino acid
  MOD_RES (210)..(214): Variable amino acid
  MOD_RES (216)..(221): Variable amino acid
  MOD_RES (227)..(229): Variable amino acid
  MOD_RES (231): Variable amino acid
  MOD_RES (237): Variable amino acid
  MOD_RES (239): Variable amino acid
  MOD_RES (241)..(248): Variable amino acid
  MOD_RES (251)..(253): Variable amino acid
  MOD_RES (255)..(257): Variable amino acid
  MOD_RES (260): Variable amino acid
  MOD_RES (265): Variable amino acid
  MOD_RES (268)..(271): Variable amino acid
  MOD_RES (273): Variable amino acid
  MOD_RES (275)..(276): Variable amino acid
  MOD_RES (279)..(286): Variable amino acid
  MOD_RES (292): Variable amino acid
  MOD_RES (299)..(300): Variable amino acid
  MOD_RES (304): Variable amino acid
  MOD_RES (308): Variable amino acid
  MOD_RES (312): Variable amino acid
  MOD_RES (314)..(315): Variable amino acid
  MOD_RES (319): Variable amino acid
  MOD_RES (321): Variable amino acid
  MOD_RES (323): Variable amino acid
  MOD_RES (328): Variable amino acid
  MOD_RES (330)..(331): Variable amino acid
  MOD_RES (333): Variable amino acid
  MOD_RES (335): Variable amino acid
  MOD_RES (341): Variable amino acid
  MOD_RES (345): Variable amino acid
  MOD_RES (352): Variable amino acid
  MOD_RES (357)..(358): Variable amino acid
  MOD_RES (368): Variable amino acid
  MOD_RES (372): Variable amino acid
  MOD_RES (378): Variable amino acid
  MOD_RES (380): Variable amino acid
  MOD_RES (391): Variable amino acid
  MOD_RES (393): Variable amino acid
  MOD_RES (396)..(397): Variable amino acid
  MOD_RES (400): Variable amino acid
MPGGCCGXSVSLSRRXXSPRSXXPGELLRXXPPPXAPXGVXGPXPXLLPXCPXRGFLXXLVVPLFVLPPXLPXXXVFARGXLRVXXSXXRAACRXVXXFXXPXXXXWVXXCXSASXXLXXSXLVVFLXXXGAXLXXCLXGSXPFXXXXGXXRLXWXLAXLPXXXFFSXXXRLXXXXFXCXFRXXXXXXXCFXLXFPPAXVXXPXXFXXLXXXXXWXXXXXXLRVPSXXXGXRSPFFXSXFXXXXXXXXPPXXXRXXXCPXAVPPXFFXXXXPXAXXSSXXXXXXXXPAVVLXLSVCFLXXVLGXPSSXLFSXFXXCSCXVXLXSACCXLXXAXFXFSCGVXLFSXPSAPCVXASVFXXRSFRRRSARXVVGXPPAPRXRXKPHLTNAACCXAXCSXXDYXSSML

SEQ ID NO: 2123 - DNA, 1594 bp, Homo sapiens
  source (1)..(1594)
  CDS (201)..(1394)
attgatttagttgcaatgtttgataattagaatattataatgcttgtgctatgtaaaatagactcaccccctttctgataagtgaacttttttttttaataagtaagtaactgtttaacttaaatattttttcccatctttcatcgacaggtggtaacgtccttatcttggctatttggggggacaaaggagccccacatatgcaggccttacacttctcttttgccttgggtgcctttttggctccactgctagctaaactggctttgggtccgacagcgtctgctgaaaaccacacagagtctgacttccatcctgcactcaaccaatcatctgatgctgactcagaagctctgtttggagtacctaatgataagaatttactgtgggcttatgctgttatcggtacttacatgttcttagtttctgtcatttttttttgtctgtttttaaagaatagctcaaagcaagaaaaagcaagagcatctgctgagacatttcgaagagcaaaatatcacaacgcccttctttgtctcctttttctgttcttctttttttatgttggagctgaggtaacatatggctcttatgttttctcatttgcaaccacccatgctggcatgaaagaaagtgaagctgctgggttgaactccatcttctgggggacatttgcagcctgcaggggcctggcaatcttttttgctacctgtttacagcctggaaccatgattgtgttgagcaacattggcagcctgacttcatctttatttctggtgctttttgacaagaacccaatttgtctctggatagcaacttcagtgtatggggcttcaatggcaaccacatttccgagtggtgtttcttggattgagcagtacacgaccatccatgggaaatctgcagcattttttgtaattggtgcttccctgggagaaatggctattcctgcagtcattggaattcttcaaggaaaataccctgatttgcctgtagttctgtatacctctttgggagcatcaatagctactggtattttatttcctgtgctatataaattagccacttcacctcttgatcgccagcgaaaagaagacagaaagagtgaggaccagaaagctctgctctctagctccgggctaaatgaatatgaggaagagaatgaagaggaggatgcagaaaaatggaatgaaatggattttgaaatgattgaaacgaatgatacaatgaggcattctataatagagacatctagaagtagtctgacggagcccacagctgaagtctataatcaatacccatcaaatgcactggtgtttgagtcttctccttttaatactggcagtgcccatgtgaagcacttgccagaaaccaggacaaaagggactaacgtttagagaagatggattactcactgacatctttgaataactgccacttctaaggacgccattcagagcagagcattagcagaatttcaccatgctttggggattaaaatttttaggtccatattatagcaaatgctaaaaatttttgaaatgttctgtaattcccagagtcttccataaataaccaaatggtctcatacacgtac

SEQ ID NO: 2124 - protein, 397 aa, Homo sapiens [sequence omitted]

SEQ ID NO: 2125 - DNA, 1210 bp, Homo sapiens
  source (1)..(1210)
  CDS (201)..(1010)
ggtggcttatgtctgtaatctcagcatttcgagaggctgaggtgggagaattgcttaagaccagaagtcaagaccagcctagacagcataggcagaccccatctctacaaaaaaataaaaataagctgggcatggtggcatgtgcctgtggttggaaggctaggtgcgagatcgcttgagcccaggagatcgaggctgtaatgagacatgatcatgtgactgcactccagcctgtgagactttgtctcaaaaaaaatatatatatgtatatattcatatacatatatatgtgtgtacatattcatatacatatatgtgtgtacatattcatatacatatatatgtgtgtatatattcatatacatatatatgtgtgtatatattcatatacatatatatgtgtgtatgtattcatatacatacgtgtgtatgtattcatatacatacgtgtgtatgtattcatatacatacgtgtgtgtgtattcatatacatacgtgtgtgtgtattcatatacatacgtgtgtgtgtattcatatacatacgtgtgtgtgtattcatatacatacgtgtgtgtgtattcatatacatatgtgtgtgtgtattcatatacatatgtgtgtgtattcatatatgtgtgtattcatatacatgtgtgtgtattcatatacatgtgtgtgtatatatatttgtatacatatacatgtgtatatatattcgtatacatatacatgtgtatatatattcgtatacatacatgtgtatatatattcgtatacatacatgtgtatatatattcgtatacatatatgtgtatatatattcgtatacatacatgtatatatattcgtatacatatatgtgtatatatattcgtatacatgtatgtgtatatattcgtatacatatatatgtgtatatatattcgtatacatgtatgtgtatctatatacccatatatatacccatatacatatatatacacacacccatatgcatatatataaaatagtattttaaccatcaatttgaatattttaaaatatagatctgcttattttaggatttattttttcacatttttaaaataagagtgtagttaatataaagagattttacaaagattaaaaatactatttagaggtagcatctttctaatttactccattcccacaatttcttctgtatgtagatggatatgttgaatgcaag

SEQ ID NO: 2126 - protein, 269 aa, Homo sapiens
MRHDHVTALQPVRLCLKKNIYMYIFIYIYMCVHIHIHICVYIFIYIYMCVYIHIHIYVCIYSYTYICVYVFIYIRVYVFIYIRVYVFIYIRVCVFIYIRVCVFIYIRVCVFIYIRVCVFIYIRVCVFIYICVCVFIYICVCIHICVYSYTCVCIHIHVCVYIFVYIYMCIYIRIHIHVYIYSYTYMCIYIRIHTCVYIFVYIYVYIYSYTYMYIYSYTYMCIYIRIHVCVYIRIHIYVYIYSYTCMCIYIPIYIPIYIYIHTPICIYIK

SEQ ID NO: 2127 - DNA, 1363 bp, Homo sapiens
  source (1)..(1363)
  CDS (201)..(1163)
caatatcgttaaatgcattatgctctagaaagagtaaggctttacttgttctagccaaaattagtttaaacagtaacacagcagttcattctcatctggttatactgaatatcaaatagcctaaactttccatttctctttaatattcttgttactagaaattgttgactataaagacctatatatatgtgtgtgtatatatgtacatatatgtatatgtgtgtatatatctacatatatgtatatgcgtgtatatatgcacatatatgtatatgcgtgtatatatgtacatatatgtatatgcgtgtatatatgcacatatatgtatatgcgtgtatatatccacatataagtatatgcgcgtatacatgtacatatatgtgtatgtgtatatatgtacatatatgtgtatatacgtgtatatatgtacatatatgtgtatatacatgtgtatatgtacatatctgtatatatgtatatgtgtatatacgtggtatgtacacgtatatacacatatatacatatgcgcatatacgtacatatatgcacatggcgcatatacgtacatatatgtacatatgcgcatatacgtgtatatatgcacatgcgcacacgtgtacatgcatgtgcatatgggcatatgtgtacacatgtgtacatgtgtgtacatatgtgtgcgtgtgtgtacgtgtgtgcatgtgtgtatatatgtgcatatgtgtacatgtgtgtatatagtgtacatgtgtgtatatatgtgcatatatgtatgtgtatatatgtacacatatatgtatatgtgcgtatatgtacatatatgtatatgtgtgtatataggtgtatatgtgtatatatacgtatatatgtatatgtgtacatacgtatatacgtatgtgtgtatacacatatgtatgtgtgtatacacacatatacgtatatgtgtgtatatatgtacatatatgcgtgtgtatatatgtacatatatgcatatgtgtatatatgtacatatatgcatatgtgtatatatgtacatatatgcatatgtgtatatatgtacatatatgcgtatgtgtgtatatatgtacatatatatgcgtatgtgcgtatatatgtacatatatgtatatatgtgtacacacatttatatacatgtaagtaagtagctgggcacggtggctcacacttgtaaccccagcactttgggaggctgaggtgggcatatcatgaggtcaagagattgagaccatcctggcaaacatggcgagaacccacctctactaaaaatacaaaaattagctgggtgtggtggcacgtgcctgaaatcccaaatacttgggaggctgaggcaggagaatcgcttgaa

SEQ ID NO: 2128 - protein, 320 aa, Homo sapiens
MYIYVYVCIYLHICICVYICTYMYMRVYMYIYVYACIYAHICICVYISTYKYMRVYMYIYVYVYICTYMCIYVYICTYMCIYMCICTYLYICICVYTWYVHVYTHIYICAYTYIYAHGAYTYIYVHMRIYVYICTCAHVYMHVHMGICVHMCTCVYICVRVCTCVHVCIYVHMCTCVYIVYMCVYMCIYVCVYMYTYMYMCVYVHICICVYIGVYVYIYVYMYMCTYVYTYVCIHICMCVYTHIRICVYICTYMRVYICTYMHMCIYVHICICVYMYIYAYVYICTYMRMCVYMYIYMRMCVYMYIYVYMCTHIYIHVSK

SEQ ID NO: 2129 - DNA, 922 bp, Homo sapiens
  source (1)..(922)
  CDS (201)..(722)
tatacagcatgtgtatatattgatatagtaatatactgatatattaaatatatgatatatacatatacatcaatatattactatatcatgtaatatatgtttatgtatagtatacatgtacctatacatagatatactatacaataaacatatatagtgtatatatacatgtattttatatatacatcatatatgtgtgtatgtatacaatatacacatttagtgtatataggcatatattttatatatttacatcatatatgtatattgtatatatacacattatatacaataaaaatatatgtatatatgcactatatacaatatacatatatagtgcctatatatttttatataatacatcatattatattgtatatatgtatatgcatgtatattgtatatatacactatatatgtatatacatcatatatgtaatatatcacatatagttaacatatgtatatgtctatatatgtatatagtatatatgcataaattatgttatgtatatatgtgttatatattaagtaaatatctccatatagtatacataatacataaatatacacatatgtatatatttaatctcttttttttcaattttttaaattttactttaagttctgggatacatgtgcagaatgtacaggcttgttacatagttatacatgtgccatggtggtttgctgcacctgtcaacctgtcatctaggttttaagccccgcatgcattaggtatttttcctaatgctctccctcctgttgcactccgccctgcaacaggccccggtgtgtgatgttcccctccctgtctccatgtgttctcactgttcaactcactgcggtgtttggtttcctgttcctgtgtcagtttgctgagaatgatggcttccagcttcatccatgtccctgcaaagaa

SEQ ID NO: 2130 - protein, 173 aa, Homo sapiens [sequence omitted]

SEQ ID NO: 2131 - DNA, 1300 bp, Homo sapiens
  source (1)..(1300)
  CDS (201)..(1100)
tccagacttaggaggggagaagaaacttctacagaggaaccaaaaagtgtatattttcctttgaatcacttaggcataatcctgaagagagagaggtcaatttttgtctaccttttcattatcttgcttattgtctcctttgtctctaccttccccaacaggtgtcttatctgacttggggtgtgctgcaggaaagagtgatgacccgcagctatggggccacagccacatcaccgggtgagcgctttacggactcgcagttcctggtgctaatgaaccgagtgctggcactgattgtggctggcctctcctgtgttctctgcaagcagccccggcatggggcacccatgtaccggtactcctttgccagcctgtccaatgtgcttagcagctggtgccaatacgaagctcttaagttcgtcagcttccccacccaggtgctggccaaggcctctaaggtgatccctgtcatgctgatgggaaagcttgtgtctcggcgcagctacgaacactgggagtacctgacagccaccctcatctccattggggtcagcatgtttctgctatccagcggaccagagccccgcagctccccagccaccacactctcaggcctcatcttactggcaggttatattgcttttgacagcttcacctcaaactggcaggatgccctgtttgcctataagatgtcatcggtgcagatgatgtttggggtcaatttcttctcctgcctcttcacagtgggctcactgctagaacagggggccctactggagggaacccgcttcatggggcgacacagtgagtttgctgcccatgccctgctactctccatctgctccgcatgtggccagctcttcatcttttacaccattgggcagtttggggctgccgtcttcaccatcatcatgaccctccgccaggcctttgccatccttctttcctgccttctctatggccacactgtcactgtggtgggagggctgggggtggctgtggtctttgctgccctcctgctcagagtctacgcgcggggccgtctaaagcaacggggaaagaaggctgtgcctgttgagtctcctgtgcagaaggtttgagggtggaaagggcctgaggggtgaagtgaaataggaccctcccaccatccccttctgctgtaacctctgagggagctggctgaaagggcaaaatgcaggtgttttctcagtatcacagaccagctctgcagcaggggattggggagcccaggaggcagccttcccttttgccttaagtcacccatcttccagtaagcagt

SEQ ID NO: 2132 - protein, 299 aa, Homo sapiens
MTRSYGATATSPGERFTDSQFLVLMNRVLALIVAGLSCVLCKQPRHGAPMYRYSFASLSNVLSSWCQYEALKFVSFPTQVLAKASKVIPVMLMGKLVSRRSYEHWEYLTATLISIGVSMFLLSSGPEPRSSPATTLSGLILLAGYIAFDSFTSNWQDALFAYKMSSVQMMFGVNFFSCLFTVGSLLEQGALLEGTRFMGRHSEFAAHALLLSICSACGQLFIFYTIGQFGAAVFTIIMTLRQAFAILLSCLLYGHTVTVVGGLGVAVVFAALLLRVYARGRLKQRGKKAVPVESPVQKV

SEQ ID NO: 2133 - DNA, 1984 bp, Homo sapiens
  source (1)..(1984)
  CDS (201)..(1784)
tctatgctgagcctgtctacacggtggagactgtcctgtttctcctctatgctgagtctgtctacacggtggagactgtcctgtttctcctctatgctgagtctgtctacacggtggagactgtcctgtttctcctctatgctgagtctgtctacctggtggagactgttctgtttctcctctatgctgagtctgtctacatggtggagaccaccctgtttctcctctgtgctgagtctgtctacctggtggagactgtcctgtttcttctctatgctgagcctgtctacacagtggagactgtcctgtttctcctctatgctgagtctgtctacacggtggagaccgtcctgtttctcctctgtactgagtctgtctacctggtggagactgtcctgtttcttctctatgctgagcctgtctacacggtggagactgtcctgtttctcctctatgctgagtctgtctacacggtggagaccgtcctgtttctcctctatgctgagcctgtctacctggtggagactgtcctgtttcttctctatgctgagcctgtctacacggtggagaccgtcctgtttctcctctatgctgagcctgtctacctggtggagactgtcctgtttctcctctatgctgagtctgtctacctggtggagactgtcctgtttctcctctatgctgagtctgtctacacggtggagactgtcctgtttctcctctatgctgagcctgtctacatggtggagactgtcctgtttctcctctatgctgagcctgtctacacggtggagactgtcctgtttctcctatatgctgagtctgtctacctggtggagactgtcttgtttctcctctgtgctgagcctgtctacatggtggagactgtcctgtttctcctctatgctgagcctgtctacacggtggagactgtcctgtttctcctctgtgctgagtctgtctacatggtggaaaccgtcgtgtttctcctctatgctgagcctgtctacacggtggagactgtcctgtttctcctgtatgctgagcctgtctgcatggtggaaactgtcctgtttctcctctatgctgagtctgtctacctggtggagactgtcctgtttctcctctatgctgagcctgtctacatggtggagactgtcctgtttctcctctgtgctgagtctgtctacctggtggatactgtcctgtttctcctctatgctcagtctgtcaacctggtggagactgtcctgtttctcctctatgctgagtctgtctacacggtggagactgtcctgtttctcctctatgctgagcctgtctacacggtggagactgtcctgtttctcctctgtgctgagtctgtctacacggtggagactgtcctgtttctcctctatgctgagcctgtctacatggtggagattgtcctgtttctcctctgtgctgagtctgtctacacggtggagactgtcctgtttctcctctatgctgagcctgtctacctggtggagactgtcctgtttctcctctatgctgagcctgtctacatggtggagactgtcctgtttctcctctgtgctgagtctgtctacacggtggagaccatattgtttctcctctatgctgagtctgtctacatgatggagactgtcctgtttctcctctatgctgagtctgtctacacggtggagactgtcctgtttctcctgtatgctgagcctgtctgcatggtggaaactgtcctgtttctcctctatgctgagtctgtctacatggtgtagaccatattgtttctcctctatgctgagcctgtctacatggtggagactgtcctgtttctcctatatgctgagtctgtctacatggtggagaccatattgtttctcctctatgctgagtctcctctatgctgagcagatttctcagccatcttcttgaaaacttgtctttataatcttggcttccacgaccctgcaacaag

SEQ ID NO: 2134 - protein, 527 aa, Homo sapiens
MVETTLFLLCAESVYLVETVLFLLYAEPVYTVETVLFLLYAESVYTVETVLFLLCTESVYLVETVLFLLYAEPVYTVETVLFLLYAESVYTVETVLFLLYAEPVYLVETVLFLLYAEPVYTVETVLFLLYAEPVYLVETVLFLLYAESVYLVETVLFLLYAESVYTVETVLFLLYAEPVYMVETVLFLLYAEPVYTVETVLFLLYAESVYLVETVLFLLCAEPVYMVETVLFLLYAEPVYTVETVLFLLCAESVYMVETVVFLLYAEPVYTVETVLFLLYAEPVCMVETVLFLLYAESVYLVETVLFLLYAEPVYMVETVLFLLCAESVYLVDTVLFLLYAQSVNLVETVLFLLYAESVYTVETVLFLLYAEPVYTVETVLFLLCAESVYTVETVLFLLYAEPVYMVEIVLFLLCAESVYTVETVLFLLYAEPVYLVETVLFLLYAEPVYMVETVLFLLCAESVYTVETILFLLYAESVYMMETVLFLLYAESVYTVETVLFLLYAEPVCMVETVLFLLYAESVYMV

SEQ ID NO: 2135 - DNA, 1366 bp, Homo sapiens
  source (1)..(1366)
  CDS (201)..(1166)
agtcattgtctctgactttcagccttggcccacgctccatccacctcatacctgtactggatctggaggttgtggtagtgcccagaatcacactggtcataggggtacttggagcatgtggagacatcaccaaggctgccagcccagtggctgtggggctgggatggggtggcctcagggctgtgagcttctctgtgggaatggtgggtttttctgtggggatggtgggtttttccgtggggatggtaagtttttccgtggggatggtgggtttttccgtggagatggtgggtttttctgtggggatggtgagtttttctggggagatggtgggtttttctgtggggatggtgagtttttctgtggagatggtagtctcttcagtggggatggtgggtttttccgtggggatggtgggtttttccgtggagatggtgggtttttctggggagatggtgggtttttctgtggggatggtgagtttttctgtggagatggtagtctcttcaatggggatggtgggtttttccgtggggatggtgagtttttccgtggggatggtgagtttttctggggagatggtgggtttttctgtggggatggtgggtttttctgtggagatggtgggtttttccatggggatggtgagtttttctgtagagatggtagtctcttcaacagaggtggtggtttcttcagtggggagagtgggtttttccatggggatgctgggtttttctgtggagatggtggtctcctcagtgggggtggtgggctcttctgtggagatggtgggtttttctgtggggatggtgggtttttccgtggggatggtgagtttttccgtggggatggtgagtttttctggggagatggtgggtttttctgtggggatggtgggtttttctgtggagatggtgggtttttctgtggggatggtgggtttttctgtgggggtggtgggtttttctggggagatggtggatttttctgtggggatggtgggtttttctgtggggatggtgggtttttctgggcagatggtgggtttttctgtggagatgatagtctcttccatggagatggtgggtttttccgtggggatgctgggtttttctgtagggatgctgggtttttctgtagggatgacaggctcttccatgtaggtggtggtctcctcagtgggggtggtgggctcttctgtggggacggtgggtttttctgtggaaatggtgggtttttctgagggaatggtgggtttttctgagggaatggtgggtttttctgtgaggatggtgggtttttctgagggaatggtgggtttttctgagggcatgttgggtttttctgaaggaatggtgggttt

SEQ ID NO: 2136 - protein, 321 aa, Homo sapiens
MVGFSVGMVGFSVGMVSFSVGMVGFSVEMVGFSVGMVSFSGEMVGFSVGMVSFSVEMVVSSVGMVGFSVGMVGFSVEMVGFSGEMVGFSVGMVSFSVEMVVSSMGMVGFSVGMVSFSVGMVSFSGEMVGFSVGMVGFSVEMVGFSMGMVSFSVEMVVSSTEVVVSSVGRVGFSMGMLGFSVEMVVSSVGVVGSSVEMVGFSVGMVGFSVGMVSFSVGMVSFSGEMVGFSVGMVGFSVEMVGFSVGMVGFSVGVVGFSGEMVDFSVGMVGFSVGMVGFSGQMVGFSVEMIVSSMEMVGFSVGMLGFSVGMLGFSVGMTGSSM

SEQ ID NO: 2137 - DNA, 1372 bp, Homo sapiens; identical to SEQ ID NO: 2087
  source (1)..(1372)
  CDS (201)..(1172)

SEQ ID NO: 2138 - protein, 323 aa, Homo sapiens; identical to SEQ ID NO: 2088

SEQ ID NO: 2139 - DNA, 1417 bp, Homo sapiens
  source (1)..(1417)
  CDS (201)..(1217)
  modified_base (1)..(100): a, t, c, g, unknown or other
nnnnnnnnnnnnnnnnnnnnnnnnnnnnnnnnnnnnnnnnnnnnnnnnnnnnnnnnnnnnnnnnnnnnnnnnnnnnnnnnnnnnnnnnnnnnnnnnnnnngaattctgaaataaacaaatgcagtgaatttggaaatgatacatcaattgcttcctcctatgacatcaatactgggagttatcaagagtctgcccatcaaatgctagggagatgttttcctccagacaccaaagagaagcaacagctcagaatgactaaactctgcgatcctgcagaaagtgaattgtcgccatttctcatcaccttaattttagcagttttacttgctgaatacctcattggtatcattgcaaatggtttcatcatggctatacatgcagctgaatgggttcaaaataaggcagtttccacaagtggcaggatcctggttttcctgagtgtatccagaatagctctccaaagcctcatgatgttagaaattaccatcagctcaacctccctaagtttttattctgaagacgctgtatattatgcattcaaaataagttttatattcttaaatttttgtagcctgtggtttgctgcctggctcagtttcttctactttgtgaagattgccaatttctcctacccccttttcctcaaactgaggtggagaattactggattgataccctggcttctgtggctgtccgtgtttatttccttcagtcacagcatgttctgcatcaacatctgcactgtgtattgtaacaattctttccctatccactcctccaactccactaagaaaacatacttgtctgagatcaatgtggtcggtctggcttttttctttaacctggggattgtgactcctctgatcatgttcatcctgacagccaccctgctgatcctctctctcaagagacacaccctacacatgggaagcaatgccacagggtccaacgaccccagcatggaggctcacatgggggccatcaaagctatcagctactttctcattctctacattttcaatgcagttgctctgtttatctacctgtccaacatgtttgacatcaacagtctgtggaataatttgtgccagatcatcatggctgcctaccctgccagccactcaattctactgattcaagataaccctgggctgagaagagcctggaagcggcttcagcttcgacttcatctttacccaaaagagtggactctgtgaccagcacccaagaagaccacaggacctggccttaccagctctgccattccctcacctagacctctcttttctctcttcttttcttctccaaccctcatctgacccttttcgcctgatgtggctttttatataggaaattgatcatttcttttttgcttcatgggtacaatcttagtggtactgtcatattctttacctga

SEQ ID NO: 2140 - protein, 338 aa, Homo sapiens; identical to SEQ ID NO: 2086

SEQ ID NO: 2141 - DNA, 1261 bp, Homo sapiens
  source (1)..(1261)
  CDS (201)..(1061)
  modified_base (340)..(439): a, t, c, g, unknown or other
gcgctgaggctgctggaggcgcgggccgggcggtgcgcactgcggcgcatgccctgccccggcgccgtccgtgcccgcgggacctgacagccgggtcagaggtcagtgcgcgcggccagggcgactttcggcgtgcagagaggcgatgtgagcaggcctgccatccccaccccgcgcgaacaggtgggcgctcccgtgagatgcgtggcgtccagacctgctgcggcctcgtccgcactgcagacaccggctcgacgagcgcgcttctcggggctcgctgcagcacggtcgctagcaagcctggacggtccgcgtctcgtccacttactctcctggggcnnnnnnnnnnnnnnnnnnnnnnnnnnnnnnnnnnnnnnnnnnnnnnnnnnnnnnnnnnnnnnnnnnnnnnnnnnnnnnnnnnnnnnnnnnnnnnnnnnnntgcgctgctgtgtgctgctgtggctgggtgcctactgtgctctggcgtgcgctgctgtacgctgctgtgtggtgctgtgtgctgctgtgtactggtgtgcgctgctgtgcgctggcgtgcctgctttgtgctggtgtgtgctgctgtgcgctgctgtgctgctgtgcgctgctgtgtgctgctgtgctgctatgtgctggcgtgcgctgctgtgtgctggcgtgcgctgctgtgtgctggcgtgcgctgctgtgtgctgctgtgtgctggcgtgtgctgctgtgtgctggcgtgtgctgctgtgcgctggcgtgcgcctgctgtgtactgctgtgctgctgtgtgctgctgtgctgctatgtgctggcgtgcactgctgtgtgctggcgtgcgctgctgtgtgctggcgtgcgctgctgtgtgctgctgtgtgctggcgtgtgctgctgtgtgctggcgtgcgctgctgtgtgctggcgtgtgctgctgtgtgctgctgtgtgctggcgtgtgctgctgtgtgctggcgtgtgctgctgtgtgctgctgtgcgctgctgtgtgctgctgtgcgctgctgtgtgctgctgtgcgctggcgtgtgctgctgtgtgctggcgtgacaccggagggggagcgtgttttgtctgggatcctcatgtgacacctcagacactagatggtcctgcccagacagacgccggtccagggtcactgaggggcgtcaggagtatttccgtctggtcaggtgacatcagtgtcacatgggcattgctcacagaggggcccctggaggaaggagagtggcggtcagcactcgatg

SEQ ID NO: 2142 - protein, 286 aa, Homo sapiens
  MOD_RES (47)..(80): Variable amino acid
MRGVQTCCGLVRTADTGSTSALLGARCSTVASKPGRSASRPLTLLGXXXXXXXXXXXXXXXXXXXXXXXXXXXXXXXXXXALLCAAVAGCLLCSGVRCCTLLCGAVCCCVLVCAAVRWRACFVLVCAAVRCCAAVRCCVLLCCYVLACAAVCWRALLCAGVRCCVLLCAGVCCCVLACAAVRWRAPAVYCCAAVCCCAAMCWRALLCAGVRCCVLACAAVCCCVLACAAVCWRALLCAGVCCCVLLCAGVCCCVLACAAVCCCALLCAAVRCCVLLCAGVCCCVLA

SEQ ID NO: 2143 - DNA, 108317 bp, Homo sapiens
  source (1)..(108316)
  CDS (201)..(320)
  CDS (6586)..(6893)
  CDS (11403)..(11625)
  CDS (35649)..(35883)
  CDS (38436)..(38569)
  CDS (49760)..(49948)
  CDS (56862)..(57074)
  CDS (60383)..(60533)
  CDS (62136)..(62275)
  CDS (75449)..(75567)
  CDS (76611)..(76827)
  CDS (93827)..(93944)
  CDS (99913)..(100084)
  CDS (107990)..(108116)
ccaagtgttagatcttatgtgcagttccctttttccatgggttttagcagcccttcggaactgctatgcacattttaaagggtgcctattcctcaaggaaactgagtgtgtgaggaacaacctgggcttctgctggagggctttctggatcccagcaggcagcagcgtggttgccatgtgtgcttgagttttacactcacatgggccctggagcccagtacacccagccagcccctcaaacacttgccattgcactccctgctgccattctgagtcaggcaggggtggaattggctgtggactgtgggcaggggagggaagtgagctcagggatccccagagcacgtccaggacaaagcactggggtatatgtgtatgtgtgcatgtgcagtgtgggtttgttagaggggtttactggaagggggcttctggctgccccaggacttggataagagtcctgaattccccacccctgccacgcccagctctcacataggttagctctgtttggatgggaacagcacctttgtgccgtgcatatgatgtgcctgggacccggcctggcatcactcacctccagctgcatctcccaggcagagtctcgacctcctgctcatcctaggggtgcagcctggagctgttagaggctgtgttagtatttggtcaagtctttacatgtgaggggaagagactggatgaaatcatttatgctgagagtctgtagtttttataagccaaggttaaggtctagtcaagaagagggctcaaaaaaacgcctggctagagtttggtcaaggaaggtgtgtgtgtgtgtgtgtgtgtgtgtgtgtgtgtgtgtccatccagggaggaagaggcaacttgacttggaagaccaatctcagtaaaccaaaatccaactgggagtggggggccggggaggatgaggggaagcaagggcaggcccaggtttatggggccttaaatgtagacaattaaggggaggttgcctttagaaaaaaaaaaaggatagaaaaattaggaatacagtgttagactcagggactcggaggggcccattcaagtaaggaggcctggagtgtaagcttctcttggttcacagcagatcttcctctggggaagggtacgtacgttccaggccatgtgaacagcaaaaatgaaggccaggaggatagagtgtttagggaatgggaatcatttcaaaccctgtttgcatgaaggatatgcaagagataaagctagagaaatgtctggagatccaattacagagctcttttggctcaccctgagtaaaaatcctgttccctcagctgtgcagagccacagaaggattttggaagggggtgatttgatcacttatttatgtattagacagatcactctggaagaagtgaggaggaggggctggagccaggtaaggctggaagtaggtggcaggcagagggtgtatacaaggcactcctaccacatggcaaggaagatcccctatagatgacttcaaaatggatgctggagttcagacagagcagtttcttcatcagaaacatctagattaatatttctccaagtttaaaaatatgcttctatatatttttgtggaaatgaggcctcccatagactgaacatttgtgtccccctaaaattgatgttgaatcctagtgcccaaggtgatggcatttggaggtggggcctttaggaggtgattaggtcataagggtggagccctcacgattgggattagtgcccttgtaaaaggggctccagagatctcctttgccctctttccaccacatgaggatgcaatgagaggatggctgtccatgaaccaagaagtggaccctccccagaaaccagccatgctggcaccctgatctcagacttccagcctccagaggaataaatatctgttgtttagaagctccccagtctatgataatttgttatagcggtccaaactgactaagacaaggcccaagctatcctaagacttgtttttgattaattttttgttttgctttgtttcattttagagacaatgtcttgctgtgtcacccaggctagagtgcagtggctattcacaggcacgatcattgggcattacaccctcaaagcaattaattactgggcccgagtcatcctccctcctcagattccacagcagctgggactacagatgtggaccaccaggtccagctgattaatcttacatgctgtaacatttatttgttaataaaaaattgtatatttgttttgtttgcattaggtgtcatgcatataaaaaggaatatatttgaaatggagttttgctcttgttgcctaggctggagtgcaatggctcaccgcaacctctgcctcccaggttcaagcgattctcctgtctcagcctcccaagtagctggaattacaatcatgtgccaccatgccagctaattttgtgtttttagtagagacagtgtttctccatgttggtcaggctggtctcgaactcccgacctcaggtgatccacccacctcagacacccgaagtgctgggattacaggcattagccactgcacctggccaggaatagatttttaaatgatgatttttatttaatttaattaacttatttgtttgagacagagtgtcgttctgtcacccaggctggagtgcagtggcccgatctcggctcactgcaacctctgcctcccaggttcaagcaattcttctgccccagtcccccaagtagctgggattacaggcacccaccatcacacccggctaattttttgtatttttagtagagacaaggtttcactgtgttggccacgctggtctcaaactcctgacctcaggtgatctgcccgccttggcctcccaaagtgctgggattacaggcgtgagccaccatgcccggccactaaatgatgatttttaaagtcagataattatgccacaccttaatatttaatactttatttctacatatgacattttgatacagacatgccccatataatatggactctgtgttacataaactgtagctgtgttgaggacagtgtccactgctagaggcaaagttttaaaatgaaaagtccaaaagttaggtaagttctgttgctttaagttaggaagttattagatccctggaagttgatgcctgctttccctttcagattttcttttctttatttttttctttttgaggcaaggtctcactctgtcacccaggctggagtgcagtggcaagatcatagctcactgcagcctcaacctcctgggctcaaatgatcttcccacctcagcctcccgagtagctgggaccacaggcatgcgccaccagtcccaaataatttttttgtatttttttgtagaggtggggtttcgccatgttgcccaggctggtctcaaattcctgggctcaagcaatcctcctgtcttggcctcccgaagtgctggaattacaggagtgagccaccacatccagcccagattatcttttttaacttattgacagataaagatctggtctgctgtaatcaaaaaattttctgttgagaataaatctgagaggtagcatctgggaagtagaaccatcaaactatagaaccattttctttgcagtctcaaggaaaagagtggttgtattgattcgttctctccttcctcttgtgcagatgaaagaaaagcaattgacaaaatgcctacattttaatgtgagatggcagactgcacatacttcagttcaaagtagtctaagcatctacggggttccccagactggagggcatctcagacaccaactggtgccctgacccttcacttattaaagcagaaaaaaaaaaaaatcctaccacaaggtttaaagacacaagagccatgcggctcaggttgaaagaacaacgggcctcatgcctaccccgattccatgaagcgactgaaatggttccatgaacttttgcaactcagcttgaaactgctgatttggtccaattcttctattttccacgtgtaaaattggtgctcagtgagataaagtgacttatttctgttcacattggccagaaataaatcttaatttccctttttaaaaaaagatagtactctcactgctacgtcacacactgttatattttttaaatgtttgcagatgttaaatcaaagcatgcaccttaatgaatcttttcatctcttgggaaataaaccgtcacatattgtggaaacgcttcctttgaatttctgaaaacatggaacacatactcatattgtatatccacaaaatgcaccaggaattatgcagacgctttttttttttttttttccagacagggtctcactttgttgcccaggctggagtgcagtggcacaaacatggctcactgcagctttgaactctctagctcaagtgatccgcctccctcagcctcctgagtagctgggactatcagtgtgcaccaccacgcctggctaatcttttttttttttttgtagagacagggtctcattatgttgctcaggctcagactcttttatgtatgtgatcatttaacacttaggaacaagaaatccatcccgttgcactgattcaacatctgagattcagaaattatctgctgttttggaagactacaagatgaaccaggcaatctcttcagtttctgttgtcagggaactttacttagattttctgaaagagccactgagcagttttgagtcatttgcctcttcaagagattgttcctatttcagaggtctttcatttttcctttttgtattttgactagagtttatctgatctaaatacatgttttctcacagaaggcacaaaatgcttcataaggagtcattttgtcctttctttcttctgatgaacctgccctctcctcctctgcaaggtttcacagtgatgtgcaacgtccactctccatgctaagtgacagtgactgtaatttgctgagagagcagtgaccaaaccattggctccttcagaggctggttatttcaaccatctggagaaaaatggaggctcctaatgcagagtgaggaccttaagttgtctagggcaaagactcatttgttcattcattcattaattcacccatgcactcattggacaaacttgaatagggtactatgccccaggggtgtgaggaaggataaactatggagtggcccattcacaacaactgcacatcagggcagagcagaagtgctctaacagcaccagctccaggtcacccaaggatgaccaggaaggctccaggcagatcaagcattcgagctgggcttggaggaatatccttgattctggaggtggagttgggaagcagccatcccagcaaagaacatggcagcagagaagctgaagacaccaggatgaggagtggaccagtcggaatccttactcctggatgtgctgggggacagatggactcctccaaagagctgaatgctgggctgaacagttttagtccttaggagctactgactgttgtcaacagaaggtgacagcgcctaccctggcagctgcccatggggagtgatgagccggggaggaagatcctcaagacagtgaggacagaatgcaatatccctggcgtgttctaggggaaggcagtgaaggctaaaacttgggcaccggcagggagaataggtgggacaggagagccgtggaagacaggatgaagccagaaggagagctggagaaggacctgaggtgggggtgaagatggtgggagtgtcaaggggattctcacatttttatttttaactttaaaaagtttttaaacagaaacaaggtcttgccatcttgcccaggctggtctcgaattcctgggctaaagtgatcctcctgtctcagtctctcaaagtgctgggattacaggcatgagccaccatgcccacctgatcctcacattcttttttttttttttttttctgatacagagtcttgctctgccgcccaggctggagtgcagtggcatgatcttggctcactgcaacctccgcctccgaggttcaagagattctcctgcctcggcctcccaagtagctgggattacaggtgtgcaccaccacacctggctaatttttgtatttttagtagagacagggtttcaccatgttggccaggctgatctggaactcctgaccttgagtgatctgcccacctctgcctcccaaagtgctgggattacaggcatgagccaccatacctgactgattctcagattctgaaatgacagttaagcccaggactcaagccagggacagaagcagataacctggttttggtgagaaggttatgcacttgcttctgaaaatgttgatgatgagactaagtcttatagtttcttgtgcacctcccttggtgcctagaagaaaggttaaaacaggatacattacagagggactatcttgagagaggagttacctgggcacagcccaggggcccttgggagtgacatgcaagggcagcactggcttgccttatttggttctcccgctctttcttctttcccttgtaaaagtaactgaagcttaaaggtgaaaatgacttaaataatagaaaccatgttagccttactccccttccccattagccacaaattggtggcgatcaccattttgtgcaccgagcctgggtctcacgcttgcaagtccttgggctcatctggagtcagcttcatcagtttgtccacacagagcaggatgagggtgaggaaccagaggctccagccaacagctgccgcgatccagccgtactcgtccactcctgtgcggcagcaccgggctgcttgtgggcagaagtccacgtctggtggggaagggacagcaaggacgacggcatgcaccaccagccctgcccaggcttctctaccattaatattaacagaacaatcacagcacggtagctgacactgatgaggcctactacgtgccatgcactgtgctgcgtgcttttacacgttagcttatgccttcctcacaaagcgacaggtgcgacttttattcccattttacatgaagaaactgaggctgtaatttgcccaagatcacaagatggcagaagaactcaaacgcaagtctgcaggactctgaagccatactcttaacctctatgtattattccctaataccccttccttttttttttttttctttttgagacagagtctcactctgttgcccaggctggagtgcaatggcatgatctcagctcactgcaacttctgccttctgggttcaagcaattctcctgcctcagcctcccaagtagctgggattacaggcacgcaccaccacacccagctaatgttttgtatttttagtagagactgggttttgccatgttggccaggctggtcttgaactcctggcctcaagtgatccacccacctgggcctcccaaagtgctggtattacaggcatgagccaccacgcccagcctatccttcgttttaagtgcctaagttaatgcattcggtcattcaatgagggcaggataaagggaaccagacaaaataaagtggaactttctcttttttttttgagagggagtctcactgtgttgcccaggctggagtgcagtggtgcaatttcggctcacagcaacctctgcctcccaggttcaagcaattctcctgtctcagcctccctagtagctggcactacaggcgcatgccaccacatccagctaatttttttctatttttaatagagacagggtttcaccatattggtcaggctggtctcaaactcctgaccttaggtgatccacctgcttcatcttccgaaaatgctgggattacaggcatgagccactgcgcccagctgcaaaactttctattagctagacatgcataatagtggttgctctatgaattactgagcgccttgtggctagaagtaggcaagaagaggaaaaacgtgcatagaagaagaagaaatatgtatgccaaggacgccaaaaccaagctgttgcattgggtggaagttggactagatgatttcttatggcctttccacctccaaacttcttcaagcatttgaacctagggcattgttagctgctgacctgggatgggtcattaaagcaatctgtgtcaaagattgtgcacctagatggggatcagagccaagaaagcctttcagacctgctctgcaaatagttctgggacaaaccacactggtgcacaggaaggccaggcaggcccttgcccacttgacaccaatcaacggaaagcggggaggcctttgtttccctcccaggctgagggccagttctggggttagagcagttggcaggagaagcttactgaggcactgctccagggtcccagggtctgggtggtgagcggtcaagcttgagctgttgctgctgcttgcttctggaagaaaagataggagatagtctgaggcactggcaaaagctattcccaggcatagattttgaaatgttttttgtaaatcagtagtgagtattatgaaagtattatagaagctcccgcatgggcatattgaggctttctgcaacaaagctaactccctgttatggaccgaattatgttcccctctcccaagtttcatatattgaagtcctaaccccaatgtgattgtatttggagatgggacattcgaagaggcagttaagcttaaatgaggtcctatgggtgggccctaatccaatatggcggggtccttataagatgaggaagaggccaggtgcagtggttcacacctgtaatcccagcattttgggaggccgaggtgggcagatcacctgaggtcaggagttcaagaacagcctggccaacatgatgaaaccctgtctctactaaaaatacaaaagcagccgggcgtggtggtgcatgcctgtaatcccagctacttgggaggctggggcagcagaattgcttgaacccaggaggcggaggttcagtgagctgagatcacaccattgcactccagcctgggtgacgagtgaaactccgtctaaaaaaaaaaaaaaaagaagaagaagaagaagaagaagaagaaacatcagcaacacacatgcacagagaaaagtccacgtgagaacccagtgagaaggcgtctatttgcaacccaaggagggaggcctcaggagaaatcaaaccatcaacaccttgatcttggacttccagcctccagaatgatggctgtcaaaaaaaattaaacatcatagaagcaagcccagagactgccagaatacgcagcacatagattgattcatgagcaaggagtggaaagataaaaaggactttagcatgaattgttaaagtcctgttgtcttgaggtgtgggattgggttagggatctgaggcatccaggttcctgtccataactgacaataagaagagagatgacctctaagtccatactgttcaatacggcagccactagccacctgtggttgtttaaatttattaaaatcaaattcagtaaaaaaaactcagcttcttgtttacattagacccatgccaagggttccattgccgcgtgtgactagtggctaccatattggaagcaccactcagacatgggacatttccaccctcagtgcaagttctattattagacagtgctcatgctgacctaggtagatggaaaccaagagatggattggaagaaccttcctagaaattatattgctgttcgttctgcttcttggggaatgcaaaaaggaaaaaaaaaaaagtggtgggcatggaaactctcaaggttcccctggctgtgggtcagtgtgtccttcaagggagcttgttgtcacagcaggacgagttcagaagaaacctgctgtttagctaaagccatgaagttgctgctgagactaattttatgccacccaacccccaagccactccaatgtcctgcttaaagtatagtaattgcctcgatgcaatctgttactgtaaattatttacagctaaatggcttagagcctggtctttatttgttttggagaaactgattcctcactattctaattttccttatgactcaaataacttccttggccctgactttcatttcacctctacacctagaatggaagttgtcctcttccaaagtgagtggaaaaaaaccctagttggctgaatgctagggttaggttcgagcttatgaaattgccattgttataggtgaaaattgttcaatatcagcaattttctgtggttcaaatggaatagccccggtgaaaattcctaagaatttaaacatcgccctcctcccttataagcagagccagaagcgagggagggactggccctacttggggctattccacaagaaaagctgctgggaagacccaacgattcagtgcagttaaacttgtcttctgattctgagctcccatcataagcaaggcactgtcggggtaagtagaaagaaactcagcactcttatttggggaggggtgaagttggaaaataaaatgaatgtgcttaccataattgctgacattcactgtgtgtgttctatgggctatttctaagttctttacatgaaattacatcaattcgtcttgacaagcactatgattgtccccatgagataaaggaggaaacttggcatagagaggtaaagtcatttgctcgaggtcgcatagctagtgagtcatggaagctggacctgggttcaggctcagcggctcaagagtgcacgtcttgaacctcaacaccaacacccctggcagtggctacagaagagagtctgaggatgagaggggcagacacaggactttgggggcagggttggttttgggagcaggagtgttgcagggcatagagagtgtggtggtgttctgaggtggctgagaacaagatcaaagccaggagcagaagatggtaaccaaggtccctctgccgtgagttgcagaacccggcctggcagggcaaggcaggggatgtagatcagccttccagcctccacaggaaaatggggagataacccagcatttccagtgcccggggaggcaggagggtgggagacagtgaatggcagccctcctggcagtcaggttttgtgaaagtcgcagagaaagtacaaggggcagggagggatggaggacttaggaaagggaaggtcagacacaaatgtgcacagggaggattgcaaagcacgacagcccagtggggctgagaaggagccttcaggacacagcggaccaagagatatcattttggtcccctgatgggtgagactccagcaaataactttttcctttctttgtggcaaaggccaagagaggtggctgctcctgccttagctgaggaattgagtatctgatctccgtctcaggccaacctaagaccccccctgccccagccccacctcccaccccctgcctaatccttcagatgagaaagttctgtttcctccttcctttgcgcaggaccaaccctggccaaagaatcttccccctcctccttctttccctcccacctctcttccctccttccctcccccttcccagcctggccatgaataaagctcataacgctacctgccgagcaagccgagtggagggaggcaaaggccaggctgaggatcagggtggcccgggtggcagcggggaggcgctgcatgctggaggctgtgctgagtgcccggtgcaggtgagccggtcctgcggagttgtgccgagtgcctgctgcaggtgagtcgactcccacctgcaggagctggaaagcaactctgccagaggtgaacttatgctgggtgtttgggggaaacaccatggggtggagcaaaggaaacttggcctgtcacaccttctctcacctctctagaagggaagccaaaccgttggctgaggaaggaagggaggggcaagctgtgcccttctcccctgagcgcaaatattgtccttattgagaaacaaggggaggacaagagagatctgtgtcatgctggttcctgggacatgagtttgctgcctctcccatctgcaggtgtagcatggatgctcaattccatttgggccaatattcactgagcacccactatgctgaagttgggagatacctgctgtcgaagtgcgttaattacaaacacgcatcattcaaccccagaaccgtgtttgaggaatggcttgggaggataaagcactgtgggtttcaacagtggaggccacatctgctgatgggatgcttcaagaagaaaatggcatttgaggttgggcatgggggctcaccctgtagtcccagcactctgggaggctgaggcaggtggatcacttgaagtcaggagttcaagaccagcctggccaaaatggtgaaaccccatctctaataaaaatacaaaaattagccaggtgtggtggtgcatgcctgtagtcccagccacttgggaagctgaggcaggaaaatcgcttgaacccggaagacagaggttgcagtaagctgagatgctcctgaccctgcattccagcttggccgacagagggagactccatctccaaaaaaaaaaaaaaaaaaaaaaagaaaatggcatttggcctgggccttgaaggatggctagaattttgacagggggagaggggaagatggcattataggtagagggacagatgagcaaaggtccagaggtaaggaagtgtcagagggtggctgtaccagcagcacccagaagcgcaggtgagccaaggcatgtgaggtggggaggcaagaggagagctgtgggctaagcttctgcgtgcctggtagaggaatttgaaacaaagtcaggaagcaaaggggaaggttctgtagagattttgagctgaggagtaacttgactagagctctgcattccgtctaaaacatttattgaagacccacatgtatataaaaggtctcatcctaggcactggagactgagatgactgagacacgcctcttccccttgagagcacagtgcagcagggaaccaaacccggaagaaagaaatttgatgcaacctggcaagactcaaataggggtaccttccactgtgatgggaataaaaaggaggatgggatgaactctgcctgagaggtataggggaaggattcacagagaaagtgacatttgggctgggtgctgaagtttgtatgtgcagattagagttgatgggcttttcaagtcaaaggaatagcacctataaaggcgagggaatcgtctgtgtgcacacagcctgccatgtgtggaagtgttcctgcgcatgaatgggcctggtaagggtgaggggtggactccagctctgtggaaagacatagaaggcgtgagtaagccccaaggaaagatttcctagtggagtgtaacagcccaggggaggcacttttttctaattggctctaagatataaaatagtggtggcctatgttcctggatttggggatagggccaacgtgccctaggaagggtgattttcagtcagtgcacagaagtccagtttaggcattaccactagttgaacattaaacagttgcatgccaggccaggctctcggtgtggggacctgggggtgagaaagaccacacagcccttgtgctcaaggaactcaaggtccccacagagaggacgctgcttagtagaacaaatgctgtcctcgatgttttcctcacaagtaaaccctgcagtgggcttcacagggcaggactgatttatccaatgggtactagggataacagcggtacgtggaatccccaagatttccaaggatctcaaaaatgtttgagacctgagaaaatattctcagatccaaaatttgaagaacagaccaggcatattggcacacgcctgtcatcccaacactttgggaggccgaggtgggaagatcacttgagccagggagttcaagaccagcctgcacaacatagtaagaccctgcctccgcaaaacaaacaaaaaaaaacacaaaaaaattacttgggtatggtagtgtgcacctgtagtctcagctactcaggaggctgaggtgggaggatcacttgagcccaggaggttgaggctgcagtgagctgagatggcaccactgcactccagcctgggtgacacagtgagaccctgtccccaaacaaacaaacaaaaatttgaacaatcaaaaactgggcaaaataaatgattgtttcaaaagcaaagttatacagttcacttgaaatgtttaaacggaaacgatttaatgtgggacgctgggtgcattttaatgtgtttgacgtgagcagagcctgtccctcctatggaatcggaacctgaggtatgcaaacatgtaagatggcctgcctggggttattgtagtggtggattgaacagcatctgcagcctaagctgagaccatcctatcaagtcgtatcagggaaagcttttctggcaagcagtggatgtggaggagggggataatgtgttggccctccctccctattttatcattgttatgtgatgtcggactgttttagatgagctgtttgtaggacaaacattctcctatctacagatggaagaactttgttattcgaaaatagtataggctgggccaggcacggtggctcaggcctgtaatcccagcactttgggaaactgaggcaggtggctcatttgaggtcaggagttcgagaccagcctggctaacatggtgaaatcccatctctactaaaaaaattcagaaatattagccaggcgtggtggtgcatgcctgtaatcccggctacttgggaggctgaggcaggagaatcacttgaactggggaggtggaggttatagtgaaccgtgattgtgccactgcactccagcctgggcaacagagtgagactctgtctcaaaaaaaaaaaaaaaaaatagggtgggctggactggccaatgataactattaaccccaaagaaagggctgtgtgtgtgtggccactttttactttacgagtgtcaccagtatttgctgtttgtagcaggtctacaactaacaactccatgtggcccatttcctcactcatacattttgcatcaggtttactttggagcgcatatcaggaagttgccttactcaaagctagactttctcaagactttttttttttttaaatgggtgagataggtatttggttacacacactattttaaaagttcaggctgaaatgtctgtggctaggcaccatggtggtggttggagagaggagtagccaagagagtgggattccagggctcttactgcttccaatttcacctgttatccctgataagatttcatgtgaaaaagaaaagaagtaggcagagagtttccagggctaaaagatggaaaacctgcagtctgtggcctggaacggcccagggaagaatatttcatgttaatgaagcttctcttgtgattctgataggccccgttgccacctgtccatctcggggaaaagacctctcaccttgaacttgggtttttcatctccagttaacccaaaatctattcagaggagaattgtggccctaaccaagcctgtgcctgccaagccccagctccctcacagagatggggttgatggctcttcttgctcctggctctgtcaggatctgtttttacaaaataatgtcaggctctgggtggttgtgggaccgaaacatctagatgtggacctgagcagcacttagtttgtggaggagttaacctcactccctgcccttcagtgatgggtctgtaatttggagagaacaagaggttcccttttaggaaaccttgagaactacagctgttaagatcatgccatagagttagttgatcaaagtaagaaagtcagcaaggaagtcctggagtccaccatttggaataatttttgaacacttcccaggatgactaatttagcttgttcaaaattgcactgggaggcggtgcagctatggtccagacacgcggaggttaacacaaaggaggtccttcctcttggcgaaaacaaccttccacctaggtcctgtatcttattccctcccatcttctctgaagtatatttcttaatttccaaacatacggaggttttctagttatctttttgttattgatttgtagcttagttgcactgtgacctgcgaatatactttgatgatttctattttttgatgttagttaaaagacaccatatgaccaatttttgtggctcttgaatgtgtcatgcagttgtggggtcagtgctccgggtaagtccattagatcaagagtgctaattgtgtggttcagaacatccatatttttcctgtcttttaaaatttggtctaattattctgttgaatacagagatgattgcgggtttctttcttccctgtagttttgtcaacttttgcattcaatatttgaggctgtaattgaggtacaaacaaatacggaattttgacaacttcctggcaaattgaaccttcttttaaaaaatcattgtgtaatatccctcatctcttttatatttttgagatggagtctctctctgtcgcccaggctggaatgcagtggcacgatctcggctcactgcaacttccacctcccgggtccaagcgattcttcttcctcagtctcctgagtagctgggattacaggcgtgtgccaccacccccgggtaatttttgtatttttggtagaaacaggggtttcaccatgttggccaggctggtcttgaaatcctgacctcaggtgagactcccgtctcagcctcccaaagtgctgggattacaggtgtgagccactgcgcccagccttctttatctctagtaatgtttttttgccataaactttactttgtctgatattgctgtagctataacaggtttcttttgttttgtttggcatgctaaatcattttcccatcatattactttcaacttttctaaaaccctgttcaagatgggaggatttcttgagcccaggactgtgagaccagcctgggcaacatagtgaaactctgttgctacaaaaaaaaaaacaaaacaacaaaaaaaaaaacaaacctgagtttggtgatgcaagcctgtggtcccagctactcaggaggctgagataggaggattgcttgagcccaggagatccgagatggcagggagccatgatggagtcactacactccagactgggtgacagagtgagaccctgtctctaaaatttaaaaacaaacaaatcaatctatcagcttaccaagtgctctctactcttcccatctagcttatgttccttttctctttcttctcactacttttggattgagttgttgggttattccattttgtagagattacgacatgcattccttttttgttgctttttaagattattttattctgcaacccaggagcatagatccaagttaccctgaatatatgttctcacaagtgcattcttaacatatcaaagtctaatattaattgacactttcaccactttcatagataatatgaagacctcagaactttaactccatttacccactcgcccaggctggagtgcagtggcgctatctcggctcactgcaagctgcctcctgggttcacgccattctcctgcctcagcctcccgagtagctgggactacaggtgcccgccaccacgcccagctaagtttttgtatttttagtagagatggggtttcaccgtgttagccaggatggtctcgatctcctgacctcgtgatctgcccacctcggcctcccaaagtgctgggattacaggcgtgagccaccacacctggcctatccactcctgatttttataccattgtagtcatgtatgttagttatacacatagtttttaactcaataagtcattattattattattttccaagtgaatatatgagtgaaatttattaaatttatttacatgtttaccggtttattgttcttaatttatttctgcatgtctggtcttccatctgtgatcattttccttctctttgaagaataccatttagtattccctcagtggagtgattaacatgttactttgtttgtctggatatgtttttattcttccttcattcttggaaatcaccttcattgggtacaaaatgtaaggttggcagatattttctttcagtgctttaaagataacatttcatttcttttggctaccattgtttctgttgagaactgtccacctcactggggcttcattgcagataatttgcctcttttattttttggctgtttttaaatttttctttgcctttggttttcagcagttttactctgatgtgctgaagtatggattccttttttgtcctctttggagtttgtaggcaattggatatggagcttgatgttattaataagttttgaaaacttctcagccatcaaatactacttgtgaaccattctctcctctctttttgtgactgattacacataggttagatctttccactccatcctgtaattctcttaccttcttctttattctttatctttttgttttcctgtgttttactctggatattgccttttgcccagtcttttatgaaatctcttgtcatctgtgtctaatcctcttttataactacccattgggttcttaatttcgattatcttagttttagttccagaatttccattctgttcttttttatatttttttttctgccaaactattcagtcctgtttttcatcttcataaacagaggggatataattcctttaaaatccgtgtctgataacctcagtcttcgccattcttttcccattcgtttatttccattgtctattatttctgctgttttcattcatatgatcatgtttctttgcatacctggttattttttattgtgggcaaaattgcaattacatactattgtttatagaaataacttgagacccaggataatgctttcttcctgtagacatgatttttgttgttgttgctttaatcgagtgcttgggggcaacacaaatctgctatcatgtcattccggtctcaggaattgagacgatgtgtgtcagtttattttggatacctttccttctatggtgtagccctttagaaatttcatccccaaggaaataaccaaagatgagcacaaaaatgcatatccaaagttctccatctcaatattacaatgtttgtaaaagtgaaagcttggaagcagtttataatgaaataaagggtagctattaaaaccgtttttgggactgggtatggtggctcacacctaaaatcccagcattttggaaggccaaggtgggctgatcacctgaggtcaggagtttgagaccagcctggccaacatggcaaaaccccatctctactaaaaatacaaaaattagccagtcctggtggtatgtgcctgtaatcccagctactcaggagactggaggcaagagaatcgcttgaacccaagaggcagaggttgcagtgagccaagatcatgccactactctccagcctgggttacagagcaagactctatctcaaaaaaacaacagcaacagcagcaacaaaaaacattcttgggtaccatttaatcacttgggaaaacatttgccatagtatacaaaacagaaaagcaggatataaatctttatgtcaatataattccagttttgtaatatatacacatatacaatgaaaaatgtttggaatgaatcctctcaaaatgttagtagtagtcatatctaggatgtacagttttgggtggttttaattttgtttttaatacttttttgtgtttccattttaaaataatgaatgtgtatattatttttatgatcaagaaataaaatcaagttaatacttttttttttttttttttttttgagacagagtcttgctctgtcacccaggctggagtgcagttgtgcaatctaggctcactgcaacatctgcctcccgggttcaagtgattctagtgtctcagcctcccgagtagctgggattacaggcatgtaccaccatgcccagctaattttgtatttttagtagagacagagttctccatgttggtcaggctggtctcaaactcccaacctcaggtgatccacctgcctcagcctctcaaagtgctgggattacaggcgtgagccactgcacctggcctaagttaatacattcttaaagattatttcacaggaaagcaatacagtcacaatgaagcagacagattttacatatctgtcccattacctgggaaaaatgttcaatatcagggaatcttcttttccattaaaaaaacaagctggccaggcatggtggctcacgcctgtaatcctagcactttgggaggctgaggtgggtggatcacttgaggtcaggagttcaagaccagcctggccaatatggtaaaaccccatctctactaaaaatacaaaaactaggcaggcgtgatggtgggcacctgtaatcccagctactcgggagggtgaggcagaagaattgcttgaacccaggaggcagagtttgcagtgagccgagattgcaccactgcactccagcctgggcaacagagcgagactctgtctcaaaaagaaaaaaagacaaaaacaacaacaacaacaaaaaaaaaccccccaaaaaaccttaacctttaagtttcacatggtgcagattactgcctatcatagcctcagctcttggagtgctcgtggtcacaatggaatgtacagacatatccacggatggtcaggacacaaagaagactagaaagaagacacagatataacatcggattacaattagaatctcagtgttggaaaaggacctcagagaccatccgggccaatctttaaccttggaagaatgccctctgaattaatctgttctcacgctgctaataaagacatatccaaggctgggtaatttgtaaagaaaagaggtttactgaactcacagttccacatggctggggaggactcacaatcatggcagaaggcaaaggagaagcaaaggcacatcttacatggtggcaggcaagaaagcgtgtgaaggggaactcccatttataaaaccatcagatcttgtgagactcatttcctatcatgagaacagcacaggaaagacctgcccccatgattcaattacctcccactgagtccctcccacaacaagtgggaattatgggagctacagttcaagatgagatttgggtggggacacagccaaaccatatgactttcctataaggaaagtaggatattatagagtttggtatagctgcatttgacctgtcctgcttcttaaggttgttagttggacttctgcttaaatgcctcaagggattggtttcttactaatttttaagacagccagctcttctgtgggttagctcgggtagaaaagtttgtgagttactgtcatcaaacaagtaagggcattttaaggtgaagttaataaacagttggaaggagggcttttcagctctcaactctatgattggcaatttctggttccctacaattactcttatcatttgtgcaaaatatttctgttggcacaacaatctgagcatgtggtcagattcatcttttgtttaataaacagagagatttgttctcaaagagtaactttaagctaaagtttttggaaataagctgcaggtttgtaataaatattccgccaatttttcttctccagttttgttcacataaaaccgaagcgaaccagatagtcaagtcaatgattgtttggacctgtcttcccaacatccaaagacccctctctcactgtgttttctggccttttctataacttcccttcattctctttctctttttttctttttccgtttttaagacagaatctcactctattgcccagggtggagtgcagtggtgcaatcacaactcactgtagcctccacctcctagggctcaagccatcctcctgcctcagcctcctgagtagctgggactacaggcatgtaccaccacacccagctaatattttttatttttagtagagttgaggtcttgctctgttaccgaggctagtctcaaactcctgggctcaagcgatccttccgcctcagtctctggaaatgctgggattacaggtgtgagtcactgctcctggcctcttttttcttttttgaaaatgctttgtccatatgtttcattttatttatgtatttatttagagacagggtgttgcctaggttggagtacagtggctattcgcaggtgcaatcacagtgtattacagcctcgaactcctgggctccagtgatcctcccacctcagcctccttagtagctcgggctacaggtatgcaccaccatgcctagctcctcatcttctcttgtccaagctgcctctaggtttgttggttgggaacacaagaatcctgagtcaagagtcctggattccagttttcatgttgtcacttggagtgtgaccttggaggagtcatgtaaccttggtgtcgatgcgactttctagaaggggaacacgaggggaaaaatctgggggaattatgccttccatcctttgtggggagaattttctctggggtccgcaggactctgcagaggggatacgtgatgcccagaaagggttttgctatgtatacttcctaacacaaaggggtgttaagtcctgtgagaaacaactggaaagctaccgtgatggcatgaaaagaccctgaagtgcagagccctgggttctgcttccagctctgccgccaattacctgcaggaccttgagcaaattgcatctgctccctggagttctgttttctcatctctaaagtaaggagactgaatcaggtgatctcgaagtttcttccagtgatagatttctatgactctgtagtcaatgcaggatattaaatggagaaagaagagaaacaagatagtacatttaaattctttttttttcttttttagaaagtggaggtggaaatcatgataagaaacttacttgtgtaattgggagtaaatattattatagaaaaggcagataactagggaggtgctcccaagtgaaaaacttaggctagcgccgggtgtggtggctcatgcctgtaatcccagcattttgggaggctgaggtgggagggctgcttgagcccaggactttgagaccagcctgggcaacatagggagaatctctctctctcaatctgtctctctctctctccttaggctataggtaaaaaaatccatccatgataaacttcagggcattctgttgtctctcttttttttttttcctgagacaaggtctcactctgtcacccaggctggagtgcagtggtgcaatcttcgttcactgcagcgtcgacctccctggctcaagcgatcctcccacctcagcctcctgagtagctgggactagagatgcatgccacgaaggccagctaagtttattttgtgtagagacagaggcttgctatgttgcccaggatggtttcagactcctgggctcaagcaatcctcccacctcggcctcccacagtgttgggattataggcatgagccattgtgcccagcccattctgttctctttatgataaaacttcattttcctaagtctcatttccagttcctccatgacgtggcaagtgaagacaggaatgaaaggaatgtaaagcagcttttctctgaagagaagaagagagagagacacagccaaggtacgctgaggtggagaagagggaagctggagggctccgtggtggaggaggatcttctcctaaggaatgaggtggtcgtgtgctgaggggtgtggggaggagtggagagtagaggagagtggagctgtctgagagccactgggagggctcagtgtcctaggacgtgatctagaggacagaaagtggtagaacagcagggagtgccccactggcgttggatggcagcagtgagcactgagacacattcctggaaaaagtcgtggccaggaggaagtggaaatgtgcatggcagggatgatcctggttccagcatccgtagatttgatctcagtgtgctgattcatgaactcttggaccttactatcaatgaattgcattcagttgcacatgggtgtgtttgtgtgtgtgtgtgtgcgtgtgtgtgcatacaatggaggaagttgaattcattctctcttttttttagcaacctcaaatcattcttttctgtctcaaacactttgtttatgagtgcatattgtaaagggtggtgggtggcagagtcagtgcctggccaacagtgaagaagtattcagcttggctgggtgcagtggctcatgcctattataatcccagtactttggaaggccgaggcaggtggattgcttgaggtcaggggttcaagaccagcctggccaacatggtgaaaccctgtctccactaaaaatacaaaaaattaaccgggcgtggtggtgcacacctgtagtcctagctactcaagaggctgaggcaggagaatcacttgaatccaggaggtggaggttgcagtgagctgagatcacgacactacactccagactgggcgacagagcaagactccactcaaaaaaaaaaaaaaaagaaaaaagaaagtgagaagtattcagtttgagtggatgataaaatcagttatttgaatgaaggctatctggagggaattcagttcagaaaaatcagatgctctttttagaaaagtcagattgttacttttccagctagattattatttttggattaaattccttgcaaacattttagctggctctgtatttatcctttgtcattttctaaattacaatgatctcctcctgtaaattgatcttgtacactgaacatgtgattgtgtgcaatattttcctaatcctgggtacaaggatatgagaacacaggaagccctgtgttaaaggaatgcccgttttaaaggcacgtaagtggaatgctcatctcttcaccctcaagagccattctgtagaaagtcctcagggcatgaaagtgctttgccggggacctttgaggctaagtgtaaagcttttggaactggcagtgtgccccagacttgtctaaagaatgggaacagtggcctgaaacaccaaatgtcaaaagcaatgtttgtttggataatatagaggattgattctgccctaagaaagttgtttctctcaagaccgaatgctgaatttaaatattattttccttcaaagttttgagttgactttgagagtatataaaaatattatgtttaggccaggcgcagtggctcacgcctataatcccagcactttgggaggctgaggagggtggatcatgaggtcaggagatcgagaccaccctggctaacacggtgaaacaccatctctactaaaaatacaaaaaactagctgggtgtggtggtgggtgtctgtagtcccagctactcgggaggctgagtcaggagaatggcgtgaacccaggagacggagcttgcagtgagccaagattgcgccactgcaccccagcctatgtgacagagtgagactccatctcaaaaaaaaaaaaaatacatatatatatatgtgtgtgtgtgtgtgtgtatatatatgtatatatatatatgtatatatatatatgtatatatatatatatacgtatatatatatatatatataatgtttaaggattcataggtggattagtttctttttaaaaaattcaatggcacaaataattagagaaataaggctgtattatctggctttgggcaagtcacttagcctcactgtgccttacttttctgcaagagtggattggactagatcatctatatcttacctgccaatgggcacccttttgggggctagagctgtgtttggttcttctctcctcctttccttcttcctttactcttgaggttcacagtagggaacttagaaaatttactctgattttggacaaattggactgtgtttgctaatgcttggcctgtttcaactttccaagaatcagcaatgctatgaaatgttgcacataaaaaaattgagctcagacaggaaacttctagagaaatgtcaaagatgtcatggttcaaagagattgtctcagatatacatcatgggtaagaaaaagtaggagttcccattttaaaagttatttttttgagacagggtcttactcttgtcaccttggctggagtgcagtggtacaatcatggctcactgtggccttgcactcccgagctcaagtgattctcccacctcagcctcctgagtagctgggactacaagtgtgcaccactctgcctggctaatttttaaatttttcgtagagatgatttctcactatgctgcccatgctggtctgaaactcctgggctcaagcgatcctcctgcttcagcctcctaaagtgatggaattcagacatgagccatgtgcctggcctcatttttaaaatttttaattaaaaaaattttttttaaatagagacagggtcttgctatgttgcccagactggtcttgatctcctggcctcaagcaatactcccacctcggtcccccatagtgctgaggttataggtgtgagccaccgtacgcagccatggttcccattttctagatgtatctcccaactagaactcacagaatttggggaggggaagttatcaactgtctcttctcctgaaaataaataaataaaaccctctcctggtgctccatttcctctttagctgctgccctgctccctcctttctcttcacagttggtgtttttaaaagaaagctgtagttgatttctgtgcccatcttttttttggaatggagtcttgctctgtcccccaggctgcagtgcagtggtgcaatctcggctcactgcaacctccgcctctcgggttcaagcaattctccttcctcagcctcccgagtagctgggattacaggcatctgctaccacgcccagctaatttttgtatttttagtagagaaggggtttcactatgttggccagactggtcttgaactcctgacctcaggcgatccaactgcctcggcctcccaaaatgctgggattacaggtgtgagccaccatgcccagccaatttccatgcccatcttttcttcaccagccactgactttctctgagtccccagaatcctgcccatttcactccattgaagtggatccacggggtccccagtaacctccagatctttctcagccctccccttcatgaacactccatgattctcaagacattttcttcttttgagttctcattcttctgattatcctcctccctctgtttcttgtttgtctcctctgtgcagccttgaaatcctggaatttctctgtattcaggcttggacctccactgcctctccctcattatgggttgaagtgtgctgccccattccattcatatgttgtagttctaatccggaggatctgagaatgtggctgtatttggaaacagggtctttgccgagataattaattaagatgagtttatagcagagtggggtgggcccctaatccaatatgattggtgtccttataaaaagggatttggacacagacacacacatgtgaatgtgaaggcatagattggagtgatgcttctccaagccaaggaatgccaaagattgccagcaaccaccagcagccaagtaagagacctggaagattcttcctcacagccttcagagggaaccagccttgcgtggcatcttgatttcagacttctaactttcagggctgagataatacatttctgttggttaagccacccagtttatggcactctggtaccacagtcctaggaaactcatacacccaattctgcggtccccaggctagtggttgtccaatgtttttgtctcaggtcctctttacactgttaagaattattggggtccaggtgcagtggctcatacctgtaatcccagcactttgggaggccaaggtgggagaattgcttgaggccaggagtttgagacaagccttggcaacactgtgagacccaaactctacaaaaaaaaaaaaaaagagagagagagacagagaaaaatttctttaaaaaaaattgctgagaagattaggaacaaggcaaggacattgttcctcaccactccatttcacatcatactggagtcctaactaatgccataagaaaaagaaatgaaaaccatactgattaggaaggaagacataaaattttattcacagatgacttcattgcctgtatagaaaatctgaaagaggctgggcgcggtggctcacacctgtaatcccagcactttgggaggccagggtgggtggatcacgaggttaggagttcaagaccagcctggccaagatggtgaaaccccgtgtctactaaaagtacaaaataattagccaggcatggtggcaggtgcttgtaatcccagctacttgggaggctgaggcagagaattgtttgaacccaggaggtggaggctgcagcgagccaagattgcaccactgcactccagccttggtgataagagcaagactcgtctacaaaaaaagaaaaagaaaaaaaaaaagaaaatctgaaagaatcaaccaaaaaaagctttcctggaattaagtttttgtataacaaatccctttttctccatacctgttcataaggaccagcaggagcagggtgcttttagctggcaaggccagcagtacaccttcacggtcctacctcaggggaatatcaactctctagccttgtgtcataatttagtttgcaaggatcttaatcatctctcctgtctataaaatatcacagtggtctattacactgatgacaatatactgattggacctagtgagcaagaataacaactattgtagacttattgataagacatttggatgtcagagggtgggaaataaatcagacaaaaatttaggggccttctctctcagtgaaatttcttttttttaattttttttttattttttctttttgaggcaaagtctggctctttcacccaggctggagtgcagaggcatgatctcggatcatagcagtctcaacctcctgggatcaagtgatcctctcacctcagctttcaagtagctggaagcacaggcatgcaccaccacgcccagctaatttttgtttatttttcatagagatgaggcctcactatgttgcccaggttggtctcaaactctctttccccagccatccctgacattgcctaatgggctcatgaacaaagtggctatggtggcagggatggaggttgtgcgtgggctcagcaacatggacttccactcaccaaggccaacctggctgttgccactgctgagtgcccaatctgccagcagcagagatcaacactgagccctcaagatggcactattccctggggtgatccgccagctatggtactggggggtccatagactggtaccagtccatggcctgttaggaactgggccacatagctggaggggagtaggcatttccacctgagcctccacctcctgtcgtgtcagcagcaccattagatcctcagaggagcatgaaccctactgtgaactgtgcatgagaagaatctaggttgtgtgttccttacaaatctgatgcctggtgatctgagatggaacagtttcatgcccaaaccatctcccaacctccattcgtggaaaaactgtcttccacaaaacaggtctctgatgccaaaaaggttggggattgctgctttactgcatctcttaatatgaccctgctctataattagggtcaatgggaaactgcaacaacacaacccaggcagaactacaaatggcccacactcttcaggaatgaaaatttgggtcactccaccaggtaaagaaccacaaccagctgaggtgcttgctgaaggtaaagggaacatagaacaggtattctgtagtgtaggtagttataaatactggatacaaccacatcaccagctccagaaacaaggactatcattgtcaatcagtatcttttcctttattttttatgaacacacttgtgcatatatatactcatattaagcaaatatctgttttctctcttttccttttatcatgagacataaaatgtattgattttatatcagtatttaactattgttaattttacatcatagtaatgaagttatggggtatcaggagaagagtatacaccactcaagcagtttacctcctcttctggggaagagattagtgcattttcagtcgtatcatgttgggtagaattatgaccctgtcattgtctttatttggagattaagtgtggtttaagagttgcacataggtgccaagttgacaagggttggacttggaaaggttaattttatggtcaacttgagtgagccaagtgatgtccacatagctggtaaaacattgtttctggatgtacctgtgggggtatttcttgaatagattagcatttgaatgggtagactgagtaaagaagacagatattccatctatatgtctatccttccaccaatattacaatcttttatttatttatttttttttaagatagggtctcactttgtcacccaggctggagtgcagtggcatgatcatggctcactgcagcctcgacctccccaggctcaggtcatcctcccaagtcggcctcccaagtagctgggatcacaggcacacaccacaaacctggctaatatttttattattattatttgtagagatgatagtctcactgtgttgcccaggctggtctgaaactcctgggctcaagcaatccacctgtcttggcctcccaaaatgctgggattataggctcaagccatcgctcctggcccaataccacagtcttgattactggtgctgtacagtaagtcttgaagttgggtagagcgtttctcccacttcattcttctattcacgagatctctgctgctaccaccggggctggaggagcagagatgcctcattactgctctgcatgtgatcttcaccatcaatgatcgggggaggggagcttattaccaatggatgggggtaaaagttctgattaggtttcttctgacacccccaacaggggcaaacaagggagccttgttaccacagagtggggctgaattcagactccccactcggcctggaagtctaggctccccacttgggctttgctggcaatggggtggggggcagggccatagttttttctgtggcgtttaactggattcgcgtgattattgtctgaaagttttctttcttggcagactgcccctttcctggtccttttgctagagcgagcaggctttctttggaacttttctgctgcacatgtactggcttctgccgcactgagtccggaatatacagattgattatctgtcccttatctgaaatgctcagaccagaagtgttttagatttcagactttttcagattttggaatatttgcatatatatatatatatatataaaatgagatgtcttggggatgggacccaagtctaaacacaaaagtcatgcatgattttttttttgtttttgagacagtctcactctgttgcccaggctggagtgcagtggcgcgatcttggctcactgcaacctttgcgattctcctgcctcagcctcttgtgtagctgggactacaggcacccaccaccacgccccgctaatttttttgtatttttagtaaagatggtgtttcaccacgttggccaggcttgtctcgaattcctgacctcaagtaatctgcctgccttggcctcccaaagtgctgggattacaggcatgacccaccgtgcccagcctcatgtatgttcatatataccttacacacatagcatgaaggtaattttatttttcccttgaggactctgaatgaaatatgtgttgtgtgcctgagttttgattgcgacctgtcacatgaagtcagcgaaattttccacttgtggtgtcatgttggtgctcggagtttgggattttggagtatttccgattttgaattttcagattagggatactcaacctgtaggaagtaacaagaaaacccagagaactcacctctgtgttgtttcttgcatcttctgattctcagagggtctatcttctgtccagctttcacagtctgcttatgtttgctgtatatatactgtacagggtttttatttttactggttgggaagaaaaagtatttctactccctttttccagatgcagaagccaaagtaatatatatgtgtgtgtgtgtgtgtgtgtgtgtgtgtgtatttttttttttttttttgagacggagtttccctctctttgcccaggctggggtgcaatggcacgatcttggctctccacaacctcctccttccgggttcagctattctcctgcctcagcctcttgagtagctgggattacaggcatgcgccaccaagcccagctaattttttgtatttttagtagagatggggtttcaccatgttggccaggctggtcttgaactcctgacctcaggtgatccacccacctcagcctcccaaagtgctgggatgacaggcgtgagccaccgcgcccggccataatatttttaaaaatgtgaaccaggtcatgccatttccctgcttaaaatttcccaagggcttcccaatgctattagaataaaattcaaattccttattggcccagcagacttggggcatggcttggcccctgcctcctactctgacataccatacacatactttttttgttgttttttttttgagacggagtctcgctgtgtcttttaggctggagtgctgtggtgcgatctcggctcactgcaacctccacttcccgggttcaagcgattctcgtgcctcagcctcctgagtagctgggattacaggcacacgccaccacacctggctaaatttgtattattagtggagaggggagttttcaccatgttggccaggctggtctcgaactcctggcctcaaagtgatcctcctgcctcaggctcccaaactgctgggattacaggcgtgagccaccgcgtccagcctatacttccactttctaagtaagcctcttctgtttttcagataaggtcactgaggccctgaggttaaatagctttcccaaggtcacgcatggtaaatggcagagctgggatcctgactccagtagttgggctggagcctctgctcttaaccattaggtacgtgtactcttttctccacatgttcctgagtggtttctgagcacccagacgtttgaaaactatggccccacccgctgactgggagacaaagcaaacacctgccttggggaagagcaagatgagaggtaggagggtgaagtggagagtggagggaggcacgaattgaggccagggctcctagtgcctctggagctcatatgaagggagaggtagaatcaacacagttcttatcttcctgctcttctttgcaaatcttgagttcagcctttggaacttcatccaggtgtctggattcttggacagatctgccctggcaggatgggtgggtgcagctgagctccgcctctcaagaaacgcaagcaactcctttcctccagggtacagagcaggtgctctctcagagggctgggcctccactgccccaggttcacaatcgctgcctcagcttagctgattttcccaaaccgcctacagctcctccctgctgcttcccagcctaaagtttgatttctcaccctgtgttctctaaacaatcgttctaatttgatcatgcacaagtatcacctgaggagcttattaaaaatgcaagtcttggccaggcatggtggttcatacctgtaatcccagcactttgggaagcagaggtgggaggattacttgtaggctaggagttggaggccagcctgggcaacatagtgataccctgtctttatgttgtcatattttataaaaattaaaataaaaaaatcagccaatggctgagcacggtggctcacgcctgtaatcccagcactttgggaggctgaggcaggtggatcacaaggtcaggagatcgagaccatcctggctaacccggtgaaaccccgtctctactaaaaatacaaaaaattagctgggcgtggtggcgggcgcctatagtcccagctacttgggaggctgaggcaggagaatggcgtgaacccaggaggcagagcttgcagtgagccgagatcgcgccactgcactccagcctgggcgacagagcgagagactgtctcaaaaaaaaaaaaaaaaaaaaaaaatcagcccaatcatagtgatgcacacctgtagtcctagctactcaggaggctgaggtgggaggatcacttgagcccaggaggttgaggctgcagtgagctgtgtttgcgccaccacactccagcctggacaacagagcaagaccctgcctcttaaaaaaaaatgcaaatcacagacaatctaggaaacttgaatcctagaattaaggcaaatttaagaattattgaattttaggagtgactggtattttatgtgtgtttgtgtgtgtatatgtgcgtataaaagaatccttatcttttagagatacctgctggaatattttgaaagaaataatatgatgtatgggatttgcttccaaataatcagaggtggggaggggaagtgggtggggtgtggatgatagaacattcatgaactggtgtggccaagtaatgtgtacgtaggggttccctgtactatttgctgtacttttgcagaaaagtacagaaaagttaaaaaaaagcacccccctcactcattctggggtaccttctaaggccactggtggggagagtccctgtgggggatctgtgcaccaccctggagaagcaaagctcattcaaacaaacgcaggtggctgttgcagccccgcacccctgggcaagagaaatgcacctaattggcttgttctgcccctcgcaccctctgtcaaagaaataggaaaagacaagacccctccaaaggaaaagggcacatatcacatatgcttctgtctctttttacctgggccacagcggaagctgaatttcagccattgggcatttcataaggagtcttctattttcctttgaaagtagagtgttttggttaatagttgataggatggtgagtgtgatattttttattttccaaaactattttaattttttcatttatatatgtatatacacacatatatacacacgtatatacatatgtgtatatactatatataatgtatataatatataatatataatgtatataatatatataatgtatataatatattatatatatagatatatatatttatttatttatttttgagatggagtctggctctgttgcccaggctggagtgcagtggcgtgatctaggctcactgcaacctctgcttcctgggttcaagcgattctcctgcctcagcctcctgagtagctgggattacaggcacccgccaccacactctgctcattttttcgtatttttagtagagacaggatttcaccatgttggccaggctagtctcaaactcctgacctcaaatgatccgcccacctcagcctcccaaagtgctggaattaccggcgtgagccacggcgcccggcccccaaaattatttttcaaagttattttgtttttacaagttcaagggatgttttggtttactggggtccttctaaggcctccaggaatcttgtcctcaaccttcagctccctgaggggcaagttactttcattagaaaataaatgaatgcttcctgctgggaacttaaggtcatggcagagggcacaggtggggcgggggctgagcaggctggccggtggggcaggtttgtcttcacccacaacaggccagtgttgatacaacagagctgcctcctggctctttgggagcctgggaggagaaggagccgggaggggcgctgcggggaagccacctgcggattcactggctgctgctccgcccaggactgctagcaagcacggagggctgccagacctggggctccctgctccgtgcgtcaggttggggaaaccaccgtctgccccagaccctgacccaggacccgcctggaggaagctggggtaagaagggtgttgatgctgtgcttttgatctgcataaagtgaatgccttgggtctctggtctatgttcacttggctgtagttactagacagggcagtaggagagctttgaattcatcttggtgtcaaaaggcacaaatgtgggcccagaccatgtgcacttcctgagggatgatgtttatcctctggtctatacatggggtattgcttctggagtacccactttgtggtgctgttgacctagaccggtgtgggagtggaaacagggaatggttctagcctcgtggacttcactggtttgtgtgtggggaatccaggcagttaaacaagcgattgcaaatgattgctcttctgggggcatgtaggagggggcttagctccttgagggagctggaggtgtcagggaaggcttgtggaggaagaagatccttacatggagactggaggagtgacagggtcatgcggggcgtgggatggacggtggagaggaggatattgagtttccaaacccaggggaaagcctgggcgaagggcctgaagggggtgggagctgggagaaatgcagggtccctggagaggccaaagctggaggaggacacagaggaggccaggtcctgcagccttcggctggccagctcgaggactttagagttggtcctgtgtgaaactgggacaatgggtaggcccagtatcgagcacacagtagatactctgtacgtgataaaattaaatctactctggaggtgtggaaattcttccagaaggttgacctggggggaaaaagtgtgatttggcagcagtagggccgtcgggaggatctttgggaatagcttctgtgccctcctcctccccttggctctcatgtggccttcaacttcaccattggaaagagcttcactttcttccaacccctgggaggtgtccttccctgccacctgttctaagtgacactaaaggcagtccaatgggcagcatgacttggatggtctattaaggaatggagaaatgttcaggagtgacaaactgccccaccccagagtttggaatgcattgatcgctgctgggaggcctctgatgaccagggctccgttccctggctacgtatgctgtgtgcgggctggtggcaatggcttcaagatcatcccccagtttcacagttaaactttggacatgcatctgttacagtatggtggatgttttaatctatttcagtctagatgtttgagattcccctttcaggagtgtgagtcttagtctttctttaatcagcagtgtcaatacacacttatgactgtatggtggaactgtgtcttgcaggtcagttttggctaacctaactcgcaccattcccctgccccactcacccgtgggcatccttcttccatatacaggacatacagatttattttattcctgctgactgcacagggctctgttatatcacagtttatttaatcattcccctaatgatggatatctaggttacagccatttactataattattacatacaatattataagaaacattcttgttcatctgtttctccatacatatccaggtctatctggataaatagcagtggacatcttgatttgtgggtatgagggatataagatttgatagacattgataaattgctctctgaaaaagctacaaagaatttacacgttaacgttggatatacccaatgggcatatggattaccaaatctcattctgatgacaaaaactatttttcctgactagggaaattgaagacaaagtattctggaatccagagttggttgtgatacccacaactgagttctagagtgacattcgagtgcatgaaagggcctgttttctcataccctccacaacttgagtctttagtcatattttaaaatattttgccagctgagagcagtggctcatgcctgtaatcccagcactttgagagaccagagtgggaggatcacttcagtccaggagttcaataccagcctgggcaacacagcaagactctgtctcaacaaaaaaataaaacaactagctgggtgtggtggtgcacacctgcagtcccagctacataggaggctgaggcaggaggatctcttgagcccaggaggttgaggctgcagtgagtcatgtttgtgccactgcactccagcctgggtgacagagcaagactctgtctcaaaaataaagtataatattttgccaatctgatggagggcataaagtgctatcttgtttttagaatcaggatagctgggcatcctggtgcacacctgtagtccccgctattcaggaggctgagatgggtggattacttgagcctgggaggttgaggctgcagtaagccagaattgcaccactgcattcgagcccaggcaacagagtgagaccctgtctaagaaaaaaaaaaaaaaaaagtctcctaaaatcagaagtgattcctaatggattttttttccctgttagattttaatttaacttaaaaatttcaccctaaggttttcacacatttattaccttaaatattaatatctttttctttttctcctgtagaccgaggctgggccaagatggtgtctgtgtttcgaagcgaggagatgtgtttgtcacaactgtttctccaggtggaagctgcatattgctgtgtggctgagctcggagagctcggattggttcagttcaaagatgtaggtactgagttctttggagataagaggaaggcaggggtgggagtagataactcttgcacaacacttctttatggtgaacaataaccattttgtagggagaggagccgtgagctggaatcgatgaaattctgtagttttagtgcttctggctaggatttgtcatgaccaggcaggtcattcaagagcgtgttctccctccctccatgcctgtctcctctataggaatgtcttgaagctctaatgcaatcactactcattagatgtcattgaattttttttctcttatgtagcatcttcaaacattgtatatagccaatgggcatgtagattaccaaaccttattctgaccataaaaactatttttcctgactagacaggctgaagacaaagtattctggagtccagagttggttgtcatacccgggattgagttccagagtgatattctagagttagacagtcttgagtatgacatgggggtatcatttcccaggggcagtttagaccctcaccaagttcgtagtctaattgagaaaaccagtccttctttacttcttcactaaggtcaaggtcagagctaagctcctgcagggaagaatcacatcttgttgttcgcatccctagttcttcacacaggacctcgtatgaggcaggtcctcaataacgtttattgagctgagctgagagttgaagttttgttgatgactgtgatacgttacatggagctgtgcaatcttcaaggtctggtcatttttatgaccccattgaggattttgaggctcatttggatagccaaggcagagaaataaggtaaacttagatgaggacagacttcctttccttccttccttcctttcttccttccttcccctccctctcttccttccttccttttttcttttcttttcctttctttttactttacttttcttttttcaggcagatatatgattttctcccatgctgtgggtttttttcacttcctattaagaaagtgaaaggacactgttaagtgtcctttgatgcacaaaagttttaaattttgattaagtccaattttttttgttgttgttgtttgagacagggtcttgctctgtagcccaggctggagtgcagtggcacaatcacggctcattgtagccttgacctcccaggctcaagccatcctcctacctcagcacaccaccacgctcggttaattttgtaattttttgtagagatgaggtctcattatgttgcccaggttggtctcgaactcctgggctcaagggatccaccagcctcgacctcccaaagtgttgggattacaggcatgagcaactgcacctggccaggactttgtttcttttagaaacgagagggtgaatgttgaagcatttgggggattgaatgtaagaacactaaggtgtgttttgcctgtaactcacctgtcttgtgcatggaagtatctgttcctaagataattccagcaacattctctagtattaaaaagataataaaatgaccaaaagggggcttagcgcagtgcctcacgcttgtaatcccagcactttgagaggctgaggtgggcggatcacctgaggtcaggagcttgaggccagcctggccaacatggtgaaaccccatctctactacaaatacaaaaattagccaggcgtggtggtgggtgcctgtaatcccagttacttgggaggctgaggcagaagaatcacttgaacccaggaggtggaggttacagtgagctgagatcgcgccattgccctccagtctgggtgacaagattaaaactcagtctcaaaaaaaaaaaaaaaaaaagaaagaaatctattggcagctgttgctactaacatgtatcttgtgattttcgcccccatagttaaatatgaatgtgaacagctttcaaaggaaatttgtgaatgaagtcagaaggtgtgaatcactggagagaatcctccgtaagccaattttttttttttttttcttactgttcaaatgtgaactggcaagggggttaatagtttgcaggacttaatgaacaaatgtgtccctatttgcaatactttttgaggtggtcccagaggcccacctggagggaatgggggaggttgggggtgggatccaggtgctgtggcagctcctaggacaattcaggtagctgagctgagtgaaaggcacatgtcttgcttgacctcatttcttagttatgagaaaacacaatcaccttggggtttctggtgggttttcattcttcaggttttctggaagacgagatgcaaaatgagattgtagttcagttgctcgagaaaagcccactgaccccgctcccacgggaaatgattaccctggaggtaagttctccactttgctggcctccccaggtaaggacagtcatgaagcctgtctccttgaaggccctgagagccacttgcagattccgtacctgtttgcttgaaggcagggaggcaggcctgcatggtcgtctccctctcagggttacagccccaggaaaatcccagtgtgcggtttttagagccacacctgctgatctggagacagctgttttcctttctcagcatagccctcgggaagcttagcccactttgaggagttgattgcttttgtgggtgtttgattcttacaggcagtgtggtcttgtctgctgggtgccactgaatgggctgagtgtgggcataatgggatgttttctaattctctggtgggaagcagctgatgagttggactcactccagatggaagctgcttctctgactggcttctgtaggtcaactgggagaagactgcagttttcaaggacatttcagctggtggggctctccctctttcctttccttgtctatttccttccccttcagtcttttataaaacactgaataccagctgggcgcagtggctcacccctgtaatcccaccactttgggaggccgaggcaggcggatcacgaagtcaggaattcgagaccagcctggccaacatggtgaaaccctgtctctactaaatatacaaaaattagccgggggtggtggtaggtgcctgtaatcccagctacttgggaggctgaggcacgagaatcgcttgaatccgggacgcagaggttgcattgagctgagattgtgccactgcactccagcctgggcgacagagcaagactccatctcaaaaacaaacaaacaaacaaacaaaaaaaccactgaatacctgccacgtgcaaggtagcttagaaataaacatgactgtgccctccaagggcttatagagcagatggtggggacagggatgaggggcagggctgggagaggaagtgaagaggtaggcagagccagatcatggaggaccctgggggacttaactgaaaaagcaggtattttatcctcggcagtggaacagctcattcagggcgtgggcaggtaggcaaggcttcacctagctgagccttttctctggctgggttttttttttttttttgaagataacttcaaattcttgaaaatttcaaagccatgagtagtataaatcttgatactcacatagaaatattagattgtcaaatcttctagaaaatattttggaccttatcatatttttttgagatggagtcttgctctgttgcccaggctggagtgcagtggtgtgatctcggctcactgcaacctctgcctcccaggctcaagcgattctcctgccttagcctcccaagtagctgggattacaggcatgcgccaccacgcccagctaatttttgtatttttagtagagacagggtttcaccatgttgtccaggctggtctcgaactcctgacctcaggtgatccgcccaccttggcctcccaaagtgctgggattacaggcgtgagccacctcgcctggcctgtttattgatttttgactgtattacaaattaaaatggaaaagtatgtaaaatatttatgtattaattcacttgaaaataacaataatgtctcattacatggtaacattttttaagtgaaaaatgactgtcttttccaagacaaaaacactttcatgagaaggatggcattgtttgtgaatttttaaagtgcttggctaatagaaacagctggtttctcacacctgcttctactttaaatctgttggtgatgtgctgtttttattgaaggagaggaagataatccagccttacacagataagcagtgggaaaagggaggaatattttaatagccttttcaaataattatggatattcttctttgatattacactgaaacttgaccagcatagagcctgtcttgattttgttaaacaggtaacatgtgctgcttttgttttcaaactgagttggctgtagtaccttaataaaggaattcatccaactgggtttagttttggctgacttcaaccatgccaaggcacacacattttcaagtttaaccattttaagtttaaaagattcaatcttgactgatattaataagcttttctgggtggggggagctaaaatttgagtggatagccctttttatttttgggggaaatttattgttttgggctatatcgtttatcttttatctctttggtaagggtgtctcttagatggattaaaaaaaaaatgtctagcatgataggccaggcgcagtggcttacgcctgtaatcccagcactttgggaagccaaggcgggtgtattgcttgaggtcaggagttcgagaccagcctgactaacatggtgaaaccccatctctactgaaaatacaaaaatattagccaggcgtgggtggcgcatgcctgtaatcccagctactctagaagctgaggcaggagaattgtttgaccccaggagagggaggttgcagggaaccgagatcgcactactgcactccagcgtgggtgacagagcaagactgtgtttccaaaaaaaaaaaaaaaataataataacatgatattttaaggtgttaaagctctacattcatacatttgtaggaatagataaggggcaatcagatgtgtgcacaagtccttccttagagtttttcttctgaatgttatttgctgtaaaaatgaaattaaaacagcaccagggctggccatggtggctcatgcctgtaatcccagcactttgggaggccaaggcaggaggattgcttgagctcaggggtttgagaccagtctgcccaacataatgagactctgtctctacaagaaaataaaaataatcagctgggtgtggtggtgtgcacctgtggtcccagctacttgggaggctaaggcaggagagtggctaccagaaggtggaggctgtggtaagctgtgttcacaccactgcaccctagcctgggcaacagagtgagaccttctctcaaaaacaaaaacaaaaacaaaaacaaaaacaaaaaccaccagcataaaagtaggagagtaatatcttttaccattcattgctcactggaattgatttgttgattgattgatttgactaatcctgcagttagctgtgttcccccaacattgctagagagttgaatcctttggcaagagtacaccaatggctctgggcccctgccttgtcgagtttctaaagaggcttttataacagtcctagaggaaatactaattcaggggggagggaaaaaaccaccatcccctcagaaactgccctggcttttccttgttttcaggctttattctcatgcagctatacttttacataattatatatccattgtgtatagtaatagcagcattatttttatggcatccttaagtggatagaggaaatgattgggaaatgaagatttacttttccccccaactttgtgtcattatattcagtgttcaaaattcagggtaatggctttctctgagacgggaggtaatggagtggaactgaagctggatgatgggcggataggattcacgctgcttgtgtgtgtttgaaattttccatagtaattcaattttgtctaatactaagcatttcagggagagctaacatttacaggattatcattttttattgtttaaaaaaaatctctttgtgccaggcgcagtggctcacggctgtaatcccagcactttgggaggccgaggtgggtggatcacttgaggtcaggagtttgagactagcctggccaacatggtgaaaccccatctctactaaaaatacaaaaaaattagccgggcctggtggcacacgcctgtaatcccagctacttgggaggctgaggcaagagaatcacttgaacccgagaggtggagtttgcagtgagccaagatcatgccactgcactccagcctgggcgacagagtgagactttgtcttaaaaacaaaaacaaaaacaaaaactctgttaacagtgtcttttagatggattaaaaactagcatgataatctcttctttaataggtgaccttaatccatttccgtttattgtgatttctgattcactggctttttcagttattattccttttgttttttacttcccttccctttcctgtctttctgtaatacctgccaacccttccccactactgattggtgtgcaagctacagatgacagttacacttaacacttcaaggcacatattcactaaatttttctcataatatttgctactggttcaattatcacccctttgtggatatatgtcctttttttccctgatagcctttaaagttttatctttgttctatagtttcactcctgtctgtttcagtgtggatttgttattgtttttgttaaacattaaattgcattagtagaatttttataaaacatgtaaggtataaaaagtaaggatcagcacacaccatgtgtctgtcgccctgtgtaagataacggtacccacaggggcattcaaaaaacctgtgtgcccctcctcacccctcctccatctcctttcccctcttcccttcgagatcatcattatcctaacttctgtatttttctttattttttcatagttttattacatatttatttttctaaataacatatggtatagctttacatgttaaaaaattttctctaaatggaactatattgtttattcttctgcaacttgctatttcatcaatttcatatatattatatacatatacatatatacatacgtgtgtgtgtgtatatatatacatatatatatatatatattttttttttgagacagagtctgaaaaaaagctttgtctcccaggtgggagtgcagtggtgcgacctctgctcactgtaacctctgcctcccggattcaagcgaatctcctgcctcagcctccagagttttgcccggctaatttctgtatttttagtagaaacagggtttcaccatgttggccaggctggtcttgaactcctgacttcaagtgatccacttgcctcagcctcccaaagtgctgggattacaggatgagccaccgtgcctggcccatcattttctattttaagactccatattgtttaatgtttctgaagttatttttattgttatttatttatttttttgaaatggagtcttgctctgtcgcccaggctagagtgcagtggcacgatctcggctcaccacagcttctgcctcccgggttcaaataactctcctgcctcggcctcctgggtagctgggattacaggtgtgtgccaccattcctggctaatttttctatttttagtagagatggggtttcaccacattaaccaggctggtcttgaacgcttgacctcaagtgatctgcacatctcggcctcccaaagtgctgggattacaggcatgagccaccgcacccagcctggcctagtgttttaaacgagaggaggcatgatttgccaaaatgtcttaacttctccatgaagtggccatccactcctccaagtacttcctaatcctctcgtttggtgatggaactcttaagagagcatgcacgtgtgtgtgtgtgtgtgtgtgtgtgtctgtgtgtgtctgtgtgtgtctgtgtgtatgtgtattagggtctgcaatcatgttatgtgctgattcctttgattttttttagtcatctgttgtgggtaatgtatttcaggaatgtcatagcactttctgttggcttaccttctttttccttcctgcatagactgttctagaaaaactggaaggagagttacaggaagccaaccagaaccagcaggccttgaaacaaagcttcctagaactgacagaactgaaatacctcctgaagaaaacccaagacttctttgaggtggtcacgtggggatgagttactaaagggcccgttcctcagaacctcaaatttccattttggaaactggctggcctgggatctgagtaaatcactctgtttctgttccatggctaggccattggtgagggcgggggagtattttgggtggaataattgtagtgctggttggattgaagggaaaaatattatggtgctcagtaaaatgtatgtgctgaaaatggctcaggcagaaagagaagtcagaaccaagcacagcagttggtttgagaagttttagggttttggtaggaaaagaccagggaagctttttgatctggccaggagcactctgttttctgacttctgttaactttttgtggaaaattaaagcttcactaaaaccagagaaaatcttgaggtgtaggtgccttttgagtttccctaaatatatttaaatgaaaatcatagtgctttgactttcagacggaaaccaatttagctgatgatttctttactgaggacacttctggcctcctggagttgaaagcagtgcctgcatatatgaccggaaagttggggttagtgtaattcttgtgtgtagatgggtccctggtcctggcgagtgatttctgagtgagtgaatgaacgggtgaacaaatagccattggaatggggactgtttcccatggatgcaaagcctctgccaagcgatagacccatatgtaacttactaggttggtggagtcggaagtggtgtcagcttcttgttagtggcgatgctgacctccttgagcctgaagactgcaatgtttatattgctcccccattggaagctgtggggatcattgttcagatgggttatcacaactcttccctggcgttggaacaaggctatggggacttatgtttttcctttctctttaaaatactattttgggagccgggcgtggtggctcacacctgtaatcccagtactttgggaggctgaggtgggtggatcacttgaggtcaggagtttgaaaccagcctgggcaacatagtgaaaccccaatctctactaaaaatacaaaattagtcaggcatggtcgcacgtgcctgtaataccagttacttaggaagttgaggcaggagaatcgcttgaaccctggaggtagaggttgcagtgagccaagatcgtgccactgcactctagcctgggcgacagagcaagactccagctcaagaaaataaaataaaatattactttgataataaaatgcatttggagtttgaattttttttttttttgaaacagagtcttgctctgtcgtccaggctggagtgcagtggcctgatctcgacttactgcaaactccgcctcccaggttcacgccattctcctgcctcagccgagtagctgggactacaggcgtctgccaccacacccggctaatttttttgtgtttttggtagagacggggtttcaccgtgttaggcaggatggtctcgatctcctgacctcgtgatccgcctgccttggcctcccaaagtgttgggattacaggtgtgatccaccgcacctggcctgaatttgtgtgtttttttttgacacgggctctcactctgttgcccaggctggagtgcagaggtgcaatcatagctcactgcagccttgacctctcaggctcaagtgatcttcctacctctgcctcgcgagtagctggaccacaggcacaatgccaggctaatttttaaaaaattttttagtagagacaaggcctcactgtgttgcccgggatacatttttaaatgtaattagaaatgggggtcagatgtggtggcttatgcctataatcccagcactttgggaagctgaggcaggaggatcacttgaggccaggagtttgagatcagcctgagcaacatagcaagactctgtgtctacaaaaaaaaaaattttaataaaaaaaagaaatgggatagttatgcaatcaagttatttccaagaagcagtgatatgatgtgtcgtagccatgaaaataatgtggtgattcaaaatggtaggattttgttcagtgcctaagtgaaattgaggcattttaaagcatttctgaaaattgtgagtttgggatttatgattttttattcaataaatatttgagggcctgatatttgaggcactaggcattgaatttgaaatgaaaataaaaatatttattggaaatatttgatcagaaagtaatacaggatcaatgaacatttaaagtaataagccagtgaaagtcactggctaacatgagaagtttgggtcagcagttatctacatgcttggataatggaaaaaacagatatatatagacatcaatgtatttttccctcttagtattaaaatatttttggaaaaatgcatagagactactgttgaatatttgctatcattagctacaatgcatgatgaatggtctatcatattcttttttttttttttttttttgagacagagtttcacccttctctgcccaggctggagtgcaatggcacattcttggctcactgcaacctccgcctcccaggttcaagtgattttcctacctcagcctcctgagtagctgggactataggtgcacgccaccaggtgtggctaattttgtatttttagtagagatggggtttcagcatgttggccaggctggtctcgaactcctgacctcaggtgatccgcccgcctcagcctcccaaagtgctgggattacaggtgtgagccacggcgcctggccattctatcatattcttaattgcaattagtgacgatatagtattggaatgattaaggatatttcaagataccaaagaaaacagaaggtcaaagggacttggggcaagtcagggctggatgcggggtggccttgggactcatgtcggtagagctgtgtcggggtccctcctgctcacagagtgaatggcccttcctttcatggtgtgtcttcacgtcctacagggccttctctctgcatcccaatccctgtgccttaaggaatgtcttcccttctggctgcctaggttcatagccggtgtgatcaacagggagaggatggcttcctttgagcggttactgtggcgaatctgccgaggaaacgtgtacttgaagttcagtgagatggacgcccctctggaggatcctgtgacggtgggaaccttgggctgcaaaaactttctctgagacttcccatagccctcagcagaagcgcttcgttctcccaaaacatgggggatctttagtttgatgagactaatatctatttcctttttttctcctttttttccttcccttttactttgttcctttttaaaaatatatatttgaaaggtcagttcaaggactgattcttgtcaacacctcataactggtttattcttcccagagacatagctatacttttctctagaacttagttatactagtactatcctaggcggcagctgtgtcttaaagaactgagaactgattgaggtcagcttctcaagcttcaatgtgcacgcgagcatagaggtcacccggggatcttgttaaaatgcaaattccaggccaggcatggtggcttatgcctgtaatctcagcgctttgggagcccaaggtgggaggatcgtttgaggtcaggggattgagaccagcctgggcaacatagcaagaaaacatctctacaaaaaaaagttaaccaagtgtggtggcacacaccggtagtcccagctacttaggaggctgaggtgggaggacaacttgagcccaggaggtcaaggctgcagtgagctatgatcacaccactgcactccagcctagggaacagagtgagaccctatctcaaaaaaaaaaaaaaaaaaaaaaaaataggctgggcatggtggctcatgcctgtaatcccagcactttgggaggccgaggtgggcggatcacctgaggtcaggaatttgagaccatcctggccaacatggtgaaactctgtctctactaaaaataaaaaaattagccaggagtggtggcgcacacctgtagtgccagctacttgcgaggctgaggcaggagaatcactggtacccaagaggcggaggttgcagtgagctgagattgtgccactgcactccagcctgggtgacagagcaagactccctcaaaaaaaaaaaaaaaaaaaaaaaaaaaaaaattctgagtcagtgggtctgagtggggcctgagattccgcagttcttacaactcccagagaatgctgatgatgtatttgccaatagatcccacacttcaaacaacaaggcttcaagggggctcagcccttagtgccatacagttgttgctgtgaattctgtcggatgttgctgtctcaccttccagtttgtatttaatccacttaccctttaattcccagaagctaggcttatttctgagcgtctataatctttttcagattagaggctaaaaaaattaattttaatgaaaaaacaacaaaattcattttgatgaaaaacaactttaaaataagtgaaatttaaaataagaaagattatgaaaaaaatgagaaaccccatcactctaatgtcttcatttgtattttgcctcttgtactatttctctctatagccgtagacaggtataattttatatgattgtagcatacatggaaataatttttttcttttctttgttttacctaatatgagatccctccccatattactgtgcatccttcgtaaagatcatttttaaatttgacattaaatcatcactttttataatcctgttttgacatatgacagtcatagtgggagagaaagtaaaagcatctggaaaaagatgagcgtggacgccgaaggtcaccaaagggaagtcatgagattagagcagattcctgattctggtggatcaggagaaaagaaaatttaagagactcagaaaaggaccagggtagactccacgggtagagaaaccttttggaaataatgtaacgcagcagctctgaaaatcctaaaacaccgccacttgctcccgtaaggaaatgccaaagacaggattcattttgatagtatttttaaggaatgtctattgtgtccactgagttgacgtgacgttgactatctattttggacactttatttctaatttttctccagaatgtagacaccatgatgagcatctttatgcatgtggatttttatttgcttttgaattactttcataataaacaagttcaagaaaaataggattgctggcttaaagggtgcgggcattttaatgacacccgataggtcccgacaaatggcctttcagtgacttttctgattccagtgcctcgagtagtatgtgatgagtctattggatttgtcataacttttccaacaatagtttttgtttttgttttttggggttttttttgagacagggtctcactctgccacccaggctggagtgcagtagtatgatcatgactcactgcagcctcgacttcctgggctcaaacaatcctcccacctcagccttcctggtagctgggaccacaggtgagcaccaccacactcagctaattcttgtattttttgtagagatggggttttaccatgttgcccaggctggtcttgaacccctgggctcaagccatccacccgccttagcctcccaaagtgctgggattacaggtgtgagctactgcacccggtctgggttttgtcattttacctttaccccctcaaactaaataagattggaagaatgcattgtttcagctcatatttctttgcttacagtaagagttaaacatttgcatgtctgcttgtggaacacatcttcctttcttgtgaattgtccaacttggacttgacaagtgtgatttaagcagcagtcttatggcacacaagcaactgtgagtcaaaaaatctgagcaactgtatgtatgagtcaaaaattgggcatggctttacctttgttaaatataaaacacctactcatccccaaaatgtcggtgttgtgtgttaattaactctggtgagccagtttatcagccagctgtcttcgttttaagccttgcaatattctcttctgaatggtttcttgtttattatcatatctcttaaatgtggggcttagagctgaatataaggtctggctgtggtccaaccagcatcgggaacagggagcctgtcaccttaaggctgcattagcctctgtgaggtcctggatggccttgctctcaactgtgagctatgaacttagatgaactaggaaagttacagtttcccagttttaaatgtatgaattgtgtaagcctaaaaacaggactttacatttctctctattatgttttaaccagaaagaaacccccccctttttttttaacttattctgattttccagaaagaagaaattcagaagaacatattcatcatattttaccaaggagagcagctcaggcagaaaatcaagaagatctgtgatgggtaagagggagtgaatggctctttcttcagtgatttgggccaggattagataaagagatgtgcaatgccaaatgcacacgactgtggcttctagaggtcagtaaggctttagaataactttctcacataaaagtcagccccaactgatttttaatagttgtaagaatatgaatagggagaacttgaatatgcaaaatgtgagggtaactaaaagtggacatgttccccatttcagtctattccatctgagacttttcatcagctgctccagagtaatccaactgcatggctaacttgttttggattttacagaatcgtgttacatgtagctccatagaagcagaaatgactcagtgcagaggatattaatacattaatagattcttaggaaggggcaagcccagcttgcagtcttatttacccagcaactcacaggttttatggtttgaatgaagctcattcatataacagaactgcagcctcaattcacagcacaagtgacgtactgggaacccttatgactgggactccttttccagtggccaaagacgcagttattctaggataggctggccatctaactaaagtcagcaaatgatgtcttagcagaaaaggggatgcagaatgctttgcagcaagaactcacctgtttcctttggaatatattaaacacaggtttcgagccactgtctacccttgcccagagcctgcggtggagcgcagagagatgttggagagcgtcaatgtgaggctggaagatttaatcaccgtgagtgaggggtttgggcgcatggtctgatggcagctgcaggagggctgcctctgctgttttcatacaagccctgccccccagggcccttgctgggaggctggctggaatgctggctatgcctttctggttgtggctgtggaagatttcacaattgggaaactgttcgataagctagagggaacgaagctgtgtcttaagaatgctttgcccagggtcagatttgaccacagccctagtcagccttcaggtggccaccccgatctgataaaaggcaccctttattgccagcctcggcctagacggaatctatgatacaaccacccagccaattaagttgaacaaccagtttgactgattattttcccactgaattgcctggttgtttaagctgatgggttaattctgtaaaaacagtgagtctagtttcaccatgtgaacattcattcatcccaaactcattttctttgtaaagtctgtcaccatccagggtcactcaacacacttatgatcagaaatctttcttcaatcacagcagctttgaaagtaatcactgaaaacagctgggcctccctcgctggcagactctcatcagtgctagagttcgatagaactttcggttatgatagaaggttcatgtgtcctgtgctgtccaacactgtagtcacgagccacatgtggctattgagcccttgaaacatggctagtgccactaagtcatttagtttgtatttttaattttaattcaatttaaattttagggctgggtgcggtggctcatgcctataatcccagcactttgggaagctgaggtgggtggatcacttgaggtcaggagttcaagaccagcctgaccaaactggtgaaaccccatctctactaaaaatacaaacactagtcaggcgtggtggcagtcacctgtagtctagtctcagctactcgggaggctgaggcaggagaatcgtttgaacctgagaggcaaaggtttcagggagccgagatcgcgccactgcactccagcctgggcaacaaagcaagactccatctcaaaataaaataaaaggaaataaaatacataaaatttagtagctgcatgtggctgtggtagaagtcaactcagttttagattctggacaagtatgttaagaaattagatatgtgcctctttcaaaacccttaggctagcagacaactttacttttccagaaaacctgtgtttaatttttttttttttttttttgagatggagttttgctcttgttgcccaggctggagtgcagtggcgcaatctcggctcaccgcaacctccgcctcccgggttcaagtgattctcctgcctcagccttccgagtagctgggattacaggcatgcgccaccatgcctggctaattttgtatttttagtagagatggggtttctccatgtcggtcaggctggtctcgaactcccgacctcaggtgatccacccacctcatcctcccaaagtgctgggattacaggcgtgagccactgcgcctggcctgtgtttaattttttaatcctctccattacttctttgtcacttgtcaggaacactgtttccccgaagccattgaagtcctttccccccaattctccatgcttgattttatgaaaacgtcatgaggagaatggaaaataaattctgctagatgtgtgcttacatttagtatgacgggttgctgctgtgtcgagggcttcagatgatcccagctgagcagcttctgcaggggcagctttctcctttggctcagtgcctgccaaagatgaatcttagacactgtctgatgctgaggcatataattcgggctatgctctttgaggtttctgaaagtcacctctgtgctgaggtgctcttgtctcctggaaatccccaggccagggggcattatattgctaagtgacaggtagtattgggcttgtgagatgcttcggtggcctcatggctctcgttaatcttagagccagcatgtctctcttacagtgtgtctcttacagaggccatgtgtgctgaaaaagattaccctgtttgttgtatcatcaaaacataaaaatgattccattaaataaattctgtgtgggcccaattgtccattcattccttcattcattcacttgtcatttattggagggattatgtatgtaaagggttgtggtagatgtagtaatctcttagggttgctgtaacaaattacagcaaactgggtggcataagacaataaagatttattctgtcatggttctggaggccagaggtctgaaatcaaggcgtcagcagggccgtgctccctcggaagacctgaagggagccccctccttgcctctccccagctctggtgctgcgggccgtcctccgcattccttggcttgcaagtgcctacttctctgcctctgttgtcacgtggtattcttccctgtgtgcctctgtgtctacgtttcttatcaggacagtggtcatatgggattagagcccattcaaatccagtatgacctcttcttaacctgattccatctgcaaagaccctctttccaaaaaggccatattcacaggtatcagagttcaggactcttttatgtggacaattcaacccataacaataggacaatgaggaatttagaagaaaaggaagatacaatctctgcctaagggttttagcctctagcgggggagataaactgctcaggagagttcaaggccagatgacagccacaggtcaaaggagcctgccagagcagaggaagctgctgtggcctgtgacactccatttttggcaccttgtcaaacagctctgtgaaggttctctgttttcctgtgtgttgttttttgtataggtcataacacaaacagagtctcaccgccagcgcctgctgcaggaagccgctgccaactggcactcctggctcatcaaggtgcagaagatgaaagctgtctaccacatcctgaacatgtgcaacatcgacgtcacccagcagtgtgtcatcgccgagatctggttcccggtggcagatgccacacgtatcaagagggcactggagcaaggcatggtgcgtggcaggtggagccaggaggggtccgatgagtcagcccctctgctgggctctcagagggtgttggcctcatgggccacatgaactcaagtgacttggtggtaggattgcttccttcatctttgtgtcttcagttatcaaccccactcgaggacataaaagaaattcctttgtcttttcagtgtttgacagttgttcaccattttttgaccttttgtgagtacgtattgagctttttttttaaaaaaaaaaaaatagaatctcgctctgtagcccaggctgttgtgcagtggcacagtctcggctcactgcaacctctgcctcccgggttcaagtgattctcctgcctcagcctcctgagtagctgggattacaggtgagccctaccacgtccagcaaatttttgtatttttagtagagacggggtttcaccatgttggctgggctgctcttaaactcctgacctcaggtgattcgcctgcctcgacctcccaaagtgctgacattacaggtgtgagacatcacacccggccatactgagcattaatgtgccagtctctcagctagactatcgttttgggggggattttggtcttttttttcttattaaagatggggacctcgctatgacacccaggctggagtgcagggctgttcacaggcatgggcatactgccctacagcctcaaactcctgggctcaggtgatcctcccatctcagcctcccaagtggctaggactacaggcatgcgccaccatgcccagctccactctgctagactgtagataccacctgttacctcatggaggttatagtctagctagaaagatgaataaccaagcatctataataagagccaaaatatgtagatcgcttgcggtgtgtctgagatggctaagcactctgtcctcgttgagttctcaccgctccctccattcattccttagacattccctgtgtactaggaacggatctagggcttacacactggcaggccaagaccctgctttgatagacattctagaaagggacacggaggcatgtccgtgactaatgagatttcaggcagtgatgagtggtgggcaggaaaccaagcaggggacggcgaggggcaggatggagagtgggggcttgttctgatcaccgttattcaccccattgaaggagggaccccctcctgccctaaatagtacaagatggccgaacacattaccctgacactggacagacgggcttgacagctgtttttagtcactcgtcttcagagcccaggggagaaggacaccgcacgccatgcgggccacacagggcttgccctcgggaactgcgtttgggagcagagtgaagcagcagggccggtgggaggcaggctctgcagtgaacgagggtgaggtgacctttggttcttgcagaaggatgtgattagcttgtttgaataatttcacggggtgggaggagtgaagccattaggttgaggagtgggtggcatgcagctggttcggccgatggggaactagctgggtggcatatctagtgacggcagatctcgtggtatctgaagaaaccctctctgagcaggcggcattgatagcatgggaaggttgggggagggaggaagggtttttcaggcggaggaatctgaaggtaaaggccttgcagtaggaatgggttagaaggtgggagctttctttatccccttcgtacagataaagaaatggaggcacagaaagtagaagtaacctgactacagtcctatagccaggaggcagggtttgaatacagaaactgttcctcaaaacagtcgatgcccccacatcatggtccaaaaaccacctaaatggggcacttaaaaagcatttcaaccaggctgagcagggcgggggtgcgtcctggaggaagtgatgcatgcgcagagcgctgggaggctggccggggagcaggtgaagggaggtgcggcctcctgaaagcagaggaggattgaagctgggaccgtgagcactcgtccagctggtgtcagatcccagtgggtgtgcatgtggcacgtgctgtcgggtgtgcggtggctgtacggttcctggacagggagcacttggaattgttaagactcgagtaggtagaatggatgcagtggctcacgcctgtaataccagcactttgggaggctgaggtgggaggatcatttgagcctaggagttcaagaccagcctgtgtaacatagcactgtatggctgtagtcccagctactcaggaggctgtggcgggaggatcacttgagcccagaagtttgaggctgtagtgagctatgatcatgttactgcactccagcctgggacttcctgtctcaggaagaaaaaaaaagaaaaagaaaaaagacttgagcaagtggagaagagaggtggctagtgtagacatggccagtttccatggggaagcgtggggaagggtgaaggtgtgaatggaggattaaggcatattgttaagtagtcttgatcacaagactaaagagttttgatttcattctttaggcgataggcagcctttgaagattttaaagcaggagagtaacatgagtaaaatagtgctttttgtttgttttattaaaagagtgcttgagcaatctgggtgttagataaacggagaggggagaggctggcagagatgctgaggcttggagctagggtgatagctgtgggaatcggaggaaagattccgaaaggagaactagcaagctttgctgggtgatcgactgactgaaaccagagaaggacaaatccatgattccaagattctaggaatctgggagaatggaggctctgctgaaggggcagggagtttgtggaggggacctggctttgtggagagttgatgaattcaggattaggctcctggattttgtggggttggtgacacgttggagtttgaaagtctaagcaggcaattaggaaaaaattggggaagggccagagccatttggaagagggggatgaattgagaaagtggagaggaggaaagcatagagggccaggagtcataacattcgcatttacagcagtaggagacgggagattgtcagagactccagagggactcaattctcttgacagccctcccatgagatgaattggataagtattgggaaggtattaactctctacacataaggtcgtgagtctcagagagatcaagagattgccccaagttcgctcagtgagggacggcaggagctgggactgtgacctttgtgctgacacccagcccaagactcttctccttacatctttgtcgcttttttttttttttccaggaactaagtggctcctccatggcccccatcatgaccacagtgcaatctaaaacagcccctcccacatttaacaggaccaataaattcacagctggcttccagaatattgttgatgcctatggtgtcggcagctaccgggagataaacccaggtaaagatctgatgaactgcacgactgggtagcttgaaagtgaaaactggtaagatggacccctgaggtgaccgaggtggtgaacttgttaaaactgtgaggcttggggctagggtagtagctgtgggaatcagaggaataagtaggatagtaggggcaagtagtaggattcctaaaatcctccttggtttcgtaataccctgtggtgtcgtctataaatgccgattggtgaaagaattgttctttgtcttcacctgtgcacccttaaactgcaacctcatcaggcagccgaagtcagtgttcatttccttcaccaatacaatgagggccatatcttggcatcttcacagtcctgtggttattgtgtgggaaagacaccagtacacagaacttagaagactcgattcttggtgtcctaagctgtggaatcttgctaccttggttaataaaataaaggtgtaggctgggtttggtggctcacgcctgtaatcccagcactttgggaggcagaggaggtggatcgcttgaggtcaggagttcgagaccagcttgaccaacatggcaaaaccctgtttctactaaaaatacaaaaattagtagggcatggtggcaggcagctgtaatcccagctactcaggaggcagaggcaggagaatcgcttgaatccaggaggcggagattgcagtgagctgagactgcaccactgcactccagccttggtgacagagcgagatcctgtctcaaaaaatagataaaataaaataaaatgaaaggatagaccagataccctttatccaagcagtgcatggtgattgttcttctccagcctgaggcccagtcgaatttgtggcctgtaatgcaggggcctcctgggttgagggtccctgcgagcaaactgctggtggtgtgtggtgcatgtgaatggtggagaaacagacaaaagatgggtgtggagaagagtatagaaagcacctagagagagaaagctgatcttgtgttccatcaaactttgtgatttttttttttttgactttgtgatttttgacaagtcacttagcttctctaagcctcagcacatctgtaaagtggggaataagaatgcctactcataggctgggcacagtggctcatgcccataatcccaacactttgggaggccgaggtgggaggattgcttgaaaccaggagttcgagaccagcccgggcaatatagcgagacctcatctctatagaaaattttaaaaagtagttaggcatggtggcacacatctgtagttccagctactcaagaggctgaggtgggaggatcacttgagcccaggaggtggaggttgcagtgagccatgattgtgccactgcactccagcctgggtgacagagcgagacccactttcaaaaaaaattgaaaaacagaatgcctaggaacagatgcactcatttatgtggcagctaagcatgtgtcagggtagggatggtgagaaaagacaaccagaaaggcttaaggaaacccgcatgcaaatcgtggagctgtggcagggaatctgaggtgggggccccgaggctgtgctgaggcctcaggcgttgtgtgtctcccctccgcagccccctacaccatcatcactttccccttcctgttcgctgtgatgtttggagactgtggtcatggaaccgtgatgctcctggctgcactttggatgattctgaatgagagacgcttgctctcccagaagacagacaatgaggtgagtgtccattgaccgtcttgccctgattcattttcagaatatgaaaatctgtatgtggttttcaccatagaaataacacatttttatgaaaaataaaggagagaaggaaagtaaaaaagagccaaattaacctaaaacttctggccaaaggtaattcctttggatggtttggtgccgttcctttcagcatttttgggtttttgttcatgacttgataaggcatcgatttttctttttcattatatattttttctaactctgatgtttttgcctgattatgaaagcaatacataatcactgtaaaaattagaaaaatgcaaccatctaatgaccgagagaaaaatcaccatgaatgcttttggatatctttccaatttgtttgtgcttatccaccaatttttcaaaaattggcatcaagtaatgcatactatttgtagtgtttttacttaaaatatcatgagtatttgttcatggcagaagcagcctgggacccgtgttcttctgaacactgagaaaccctgaacatcgtttccccactcttaagtttctccacctttgcagagtgctgtgaaggctgagacaactcaggagggtgcattggttcaaagtttattggctggccaggcacagtggctcacacctgtaaccccaccactttgggaggccatggtgggtgggtcatttgagatcaggggttcgaggccaacgtggccaacatggtgaaaccctgtctctactaaaaatacaaaaattagccaggcatggtggtgggcacctgtagtcccagctactcgggaggctgaggctggagaattacttgaacccgggaggtggaggttgcagtgagctgagattgcgccactttactccagcctgggtgacagagagggactccatcttaaaaaaaaaaaaaatatctgcaatgttttattacaggttgaattaattacagctaggtcagcgatgtcgaggttagtgagcagaatcaacctgtgaccaatatagttttccatgccaagcttaaagatatgattttgtatggtaaacattttgagtttcagagttacacgtcagcacttcttggaatgattgacacacattattcagtattatgagaaagcactttattcttctcagcagacatagtcagacagggaatcaactttacaatgacaagacgcaaaatgagtatatatctgacttgtcataaatatagcagccatgggaggccagttcagtgcttatttcctggaagcacctgagacaacagccacctgctttcaagtcccttcctaagcagatgaggccttgcttgcacttcagtttattttctaatgcaggtgcaatggaagaatctgaggcatgcatatatatataatatatattataaatatatattatgttataaatatatatattatttatatttataatatatattttatatatatatatatattttttttttttttttttttgagacagagtcttgctctgtcacccaggccggagggcagtggggcaatctcagctcactgcaacctccgcctcccgggttcaagtgattctcctgcctcagcctcctgagtaactgcgactaacgtgcataccaccacatctggctaattttagtagagacggggtttcaccatgttggtcaggctggtctcgaactcctgaccccaggtgatctgcccatgttggcctcccaaagtgttgggattacaggtgtgagccatcacacccggcctttttttttttttgagacacaggctggagcgcagtggtgcaatcttggctcactgcagcctccaactcccaggttcaagtgattctcctgcctcggcctcccaagtagctgggattacaggcatgcaccaccacgcccagctaatttttgcctatatggtttttgtttcatgataacaaataccagcctaggactttttggtgcacctatatgttccaaaaaccatgatgtgtgtgctcttcctgtctggatgattgatgtctgctgtggtcatgtggctcccccaagggtgcctgcaccggtgatgctggagatatcctgtagaacgcttccctctggggtctgcttcagagcccactgacaatcatcctctctgtctctctgaggccagatttggaacaccttcttccacgggcgctatctgatcctacttatgggcatcttctccatctacacgggtttgatctacaatgactgcttctccaagtccttgaacatctttggctcttcttggagtgtccaacccatgttcagaaacggcacatggaagtgagttgacagacagagatggtgtagtcgctggccatccaggtggcctcagtgactgttttcatggttgggggagtctacacctaggtctactcagaggtgcacttgaaaattcaaataggccaggctcagtggctcatgcctgtaatcccagtgctctgggaggctgaggcaggtggatcacctgaggttaggagttcgagaccagcctggccgacatggtgaaacctggtctccactaaaaatacaaaaattagccagatgtggtggcaggtgcctggaatctcagctactcgggaggctgaggcaggagaattgcttgagcctgggaggcggaggttgcagtgagctgagattgcgccactgcactccagcctgggtgacagagtgagactccatctccaaaaaaaaaagaaaaagaaaaaatagccaagtgtgttggcacgcctttagtcctagctacttgggaggctgaggcaggaggatggcttgggccaaggaggtcaaagctgcatgagctacaatcacaccattgcactccagcctgggcaacacagcaagatgctgtctcaaaagcaaatgagaggctgggcacggtggcttacgcctgtaatctcaacactttgggaggccgaggcgggaggatcacttgagttcaggagttcgagaccagcctggccaacatggtgaaaccccatctctgctaaaaatacaaaaattagctgggcatggtggcacatgcctgtaatcccagctactaaggaggccaaggcacgagaactgcttgaatccaggaggtggaggttgcagcgagccgagatcacaccattgcactccagcctgggcaacagagcaagactccaactgaaaaaaaaaaaaaaaaagcagatgaggaaatggttggttttgtaatgctgtctccctgtatttgtcctgtggctgacagagttgggggcaggggacacctggtaaggatatgtgggtactgtagaatagagagacctggaagctctctaaatccccacagtccacccttcccctatgcattctacagtgattttatgcagttaatcagacaagcagacttcagaatggaaacataaccttttaggaatggagacttttatggggagaaagattttagagtttgagaggtaggtccatttaatgaactgggggagaacaggggactctggaggagaggggactgtgaagtgaacaaatagaaattgcgacagcctcttgattttgggggtgatcttaggctacgtgcatcacgtacctgagattcccacagtagcgtgagggctaatttgtaaaacctacatatcaatggtgacgtttcctaacatctgtctctgcccatctcctttgggtcagcttaagatttccctgtctcattctggaactttcctttgaacaaatgagaaaagaggaccaaagtgaagactgagctaggtaaacatgttcacaatctcttttcccattcttcctctcccaaggaagggacttcacgggtcttactggctcaccaaaatctgtggtgaacgtcataaatgggggacagaatgaacaatcaatttcatccaagagtttttcagttagaaaagattcaatcctgggtttatttattttttttctttttctttttctttttttttttttgagatggagtcttgctctgtcacccaggctagagtacagtggcacaatctcagctcactgcaacctccacctcccgggttcaagcgattctcctgcctcagcctcctgagtagctgggactacaggcacacaccaccacacccagctaagttttgtatttttaggagaggtggggtttcaccatgttggccaggctggtctcaaactcctggcctgaattgatccacctgcctcagcctcccaaagtgctaggattacaggcatgagccacacgcccggcccaatcctgggtttcttttgacaaagctttcctgagggcattcaaagggcttgatgttggcacagagaggctccaagagactgtagaaatatttagtgtggggcaaggagattctaacgcagtctcttcttgtttctctgctaggcctaagttccctgaagtagagatgggattccccaccttaaatatagaaaaacaaaaatatagaaaaatgaaggataaaacgttttctggaatgacatacagacagctatatctgtgatttttttttttttttgctttgcaattagtattctaaagagatgcccaaaagaacaaaactttcataaatttaaaaacaaattaggttgagcacggtggctcacacctgtgatcccagaactttgggaggccaaagtgggaggattgcttgagcccaggaattcaagaccagcctgggcaatatagggagaccctgtctctacataaaatgaaaaaaaaaaaaaaaattagctgggcagtggcacatgcctgtgcttccagctacttgggaggctgagacaggaagatcatttgagcctgggaggttgaggctgcaatgaaccgtgatggcactgttgcaccccagccttggcaatagagcaagaccccgtctcaaacaaacaaacaaacaaacaaacacattcattcttacacttagttctgctctttagatttaaactcataagtatagagatgagttttatttttttatttatttattttttattttgaggtggagtctcgttctgtggcccaagctggagtgcaatggtgcgattttggctcactgcaacgtctgcctcccgggttctagcgattctcctgcctcagcctcccaagtagctgggattacaggcgtgtgccactacacccagtgaatttttatatttttagtagagacggggtttcaccatgttggccaggctggtcttgaactcctgacctcaggtgatccacctgcctcggcctcccaaagtgatgggattacaggtgtgagccaccgtgcccggccgagatgagttttgaaacttgttcaatctgcataatttcgccagcctaccaacatgaaattccatttcccatagagtatgattgtgaaaggcccgaattaactgtcttgttaccactctgcagacatgggtatgaatgctgttctcttatgcacctgcaaatgtcttcttccccaattcaagactctttggtcttgaattggagcaatgctcagccatatgtgaagggtcaggagtataaggcagaacctcattatcactgtggcagaagaaaacgacagctgaagtacacagtgagctgattctggtcaccagctgcgacctgggtcttggacctgcttccttgatggttgaaagaccactgaaaacattcctgtagtcactggagttgggcgtattgactcaacaagggaaatggtgcatcattgggaaaaccatctctattaagagggtattagaaagggcttagaggatttagcctttgttaggaggcggggatgttgggtcatttttgtggtttggaccgtgtccttctttttgcctgtatcgaggtatgattgtggaatgatcttgttttttctcactctatcatagtcgccaggtggccttgcctgatgttgctgttctatgaagttgcttatgctcagcaggagacacgatggcttagctatgggtgccaggccagttccttcctgtcaggggtgacttttccctttatgaacacacaaacacttctctgctatggaaatccagccatttgcactgagtcatgccattaggatgggggtcacgtctgggcaagcgagtcacggtcagctgctgccactgcacattgagggccaggacagtaggccaggcttcccgattccctcagctgctacctaaggccctcagcacctcactgcagaagggagggagtgtatttctgggcagcctgtcaagactgtctgctgtctgctcttcacatttcattattttttaatttaatttaatttattttttgtagacggagtcttgctctgttgcccaggctggagtgcagtggtgcaatcttggctcactgcaacctccgcctcctggtttcaagtaattcttctgccacagcctcctgagtagctgggattacagtcatgtgtgcaccacgcccaactaattttttgtatttttatgtagagatggggtttcaccattgttggccaggctggtcttgaactcctgacctcaagtgattcacccacctcagcctcccaaagtgctgggattacaagcatgagccaccgtaccaggcctgtacctcatcatttcaaatgctcattccttgggcccttccacagatgcagttcttaaaaaaaaatcaactcaacattctcatccccttaaggcttgcagagacagagtaagaaatttctgggccgggcatcgtggctcacaccaaatcccagcactttgggaggccgaggcaggcggatcacttgaggtcaggagttcgagaccagcctgaccaacatggtgaaaccccatctctactaaaaatacaaaaattagtcgggcatggtgccacatgcctgtaatcccagctgctcgggagcctgaggcaggagaattgcttgaacctggggttggggggtgggggtggcggaggttgcagtgagccaagatcgtgccattgcactctagcctgggcaacaagaatgaaacgcagtctccaaaaaaaaaaaaaaaaaagaaatttcttcccattgacatccattcttctgggtgaaaaggggacacagatttaaagacatacaatgggctacatgtttttagagttaagtttcatagcagttgaggtgtatatgtgaaaaaacaatccatccttcagaagcagccccagtgttccctggggagacttcccaagcatgtccctgggctggggtttctttcctgtgtgctcccagcatccctgctttctacctcatttctgatgtggtacaaatcctgatctcccttccttttccttccctttccccttctgtcccctctcccccttctcccttttttttttttttcctttcaacagagtctcactctgttgcccaggctggagtgcagtggtacaatcatggctcactgcagccttgacctcccaggctcaaggcagtcctcctgcctcagcctcccaagtagctggaactaaaggcatgtgccaccacaaccagctggtctcaaactcctggacttaagggatcctcccacctcaggctcccaaagtgctgggattatgaatgtaagccactgctcccggccctgagtttctttactatagcacatcaggctgagatctctttgcaaactcagattgtagcctcagtgtttaggacaatacttgatgtgtagtagatattgaaccaaccaaagtgatgaattgcaccagtagttggactttgatgggcaagttcgtgactggtggtattatagtatcttttctgccccggttgatcattgtttgtttttctccttttctccctctaaagtactcatgtaatggaggaaagtctatatctgcagctggacccagccataccaggagtgtattttggaaatccatacccgtttgggattgatccggtaataatgtcttcttgggttaaatatttcttatgtgaactatcttgaggagacctctggagagagaagaaaaggccaacaaagcctgtcaaatcaacaaacttgtgttgagataaaataacttctgctgacgtttttgtgacacatagagccagagtcaagtaaaagttctgtctacaccttctacccagccccattttccatacagtcccccaaacgtctgcctctttctccatcaatcatatccctggtggttaataactgcttctttaaaaggcacttggttgcctggggagtatgcatattacatgagctatttagcgtcctaatcaagtttaagttccctgctttgtattttcttgcagtgggaaacatttcccttttttctaaaaaagtgtggatttacttttatgtttgctttgttttactgcatagaattgacgctttttaaaaaaggtatttgcttcattttatgtttgttatatctatctcagtcagctagatttgagctaagcaaaacgatacttcctcgcagcctgtagatataaagcggttttgaggagatacaacacatgcccgttcatgtaaagctgttcatttctattggcccagtgcatgctgccaccaggtggcggccttgtgctccaaatgagcgtgagtagtctgaaattgaacctggcaaatgctgtccatgtttcttctaagctctttctttatgggagagaacctgagacctccgttttcgttgctgacaattaggagtaaatagtactagccctaaaactggtttccagtctctcccatcttacaggtcacctcctcttaagttttcctgtgtcattccgctatcgcccgcctccctgcccttataaaaacatgaattttgcccaggatttgtttatacttgccacccagggacacttgcattctaagttttatcaaaagtggtaaagtccttgaaggctggtgtgtaagttgcaaagtgctaaaaactaatttgaatttttgtggcctgcaagacgttgtccttggtcaaaggaatttcatgtttagtaagcaggtggagaaggaatctagacggggatgatcttagggtctggttgatcttcctttgtttggaatctcattgctccaatggtctcgtctctcccctccacagcccacagttaattcatcagcaaatcctgcctgtccatttctgctcctcagacagagtggagctacggtatttcacattgcagaactgagtgatcctgagtttctactctgatgcaattttgtcatctgcccacaagttagaaaagaaagaaaatatgtcagggtgaaagagaatgtgggatattgaaaataatgaaatctgttcctagtaacatttagaattttgaaaatttctggtctttctatcctaaaataatacatatatatgatttaaaaaaatctataccacacaaaatattatataaagaaaagcaggagttggccagatgtggtggctcatgcctgtaatcccagcactttgggaggttgaggcgggtggatcacttgaggtcaggagttcgagaccagcctggccaacatggtgaaaccttgtctccactaaaaatacagaaattagctgggcatggtggcacacaccagtagtcccagctacttgggaggctgaggcaggagaattgctttaacctgggaggtggaggttgcagtgagctgagatcatgccactgcactccagcctaggcaaccagagtgagagcccatctcaaaaaaaaaaaaaaagtaaaaataccaaaattagccaggcatggtagcatatgcttgtgatcccagctactcgggaggctgaggcaggagaagtacttgaatctgggaagcagaggttgcagtaagctgagatcacaccactgcactccagcttgggtgatacagagagactcttctcaaaaaaaaaaaaaaaaaaaaagaaaaagaaaagcgggagttgcctttcctacctctccagttcctgcagtcctgttcctcagagataaccactttaacagaacacgtctgtattagtcccttttcatgctggtgataaagacatccctgagactgggtaatttataaagaaaaagattgtgtggggaggccacacaatgatggtggaaagtgaaaggcacatcttacatggcggcaggcaagagagagaatgagagccaggtgaaaggggtttccccttataaaaccatcagatctcatgagacttatgcactcccatgagaacagtatggaggaaaccacccccatgattcaatgatctcccaccagcttcctcccacagcacgtggaaattatgggaatacaattcaagatgaaatttgggtgggacacaaccaaaccatatcaatgtctgtgcctatgttagtttgtatcatatatatatattaataagggcttactttttacataacacaaatttctacagtgcatttactgactgcgtttggcatctatttgtgaatcaaatcacaaaatatttggccttcatcatagcctgggctcttaacgcaggaatcagattgcctgtgtttaaatctttgcttttctatttacttgctctgtgagtttgagcacgttaacatctctatgtctgtttcttcacctataaaacgcatataataacagccctaggccgggcgcgatggctcacacctgtaatcccagcactttgggaggccaaggcatgcggatcatttgaggtcaggagtttgacaccagcctggccaacatggtgaaaccccatctctactaaaaatacaaaattagctgggcatagtggtgggtgcctgtaatcccagctacttgggaggctgaggcaggagaatcgcttgaacccgggaggcagaggttgtagtgagccgagattgcaccattgcaccccagcctgagcaacagagcgagactctgtctcaaaaaaataaaaataaaaataaaaaaaacagcagccctaactcctaggattgcttggcaaatgaaattatgtttacatgtaaaactgccagaacagagtcttatgcacaaacgtggtaaatgctccttgaatattagttcctcttatgttatttcttcctaggtatgtaagtaacttaatcttcctgaggttatgataaattaccttatctgtaaaatgagaataactatatctcatagagttttcagtagaactaaatgagataaacacatctaaattgcttagtatgtacttggtacttaactattaacattttaaaattttctttttatttatttatttatttagagacagagtcttgctctcttgcccaggctgtaatgtagtggcatgatcatggctcaatgcagcctcgacctcctgggcctcaatctccctgcttcagccttccaagcagctgggactacaggcacgtgccatgccatgctgggctaatttttgtttgtttgtttgtttgttttgagatggagtttcacttttgttgcccaggctggagtgcaattgtgcgatctcggctcgccacagcctccacctcctgggttcaagtgattcttctgcctctgcctcctgagtagctgggattacaggcataagccaccatgccatgctgggctaattttttaaaaaagcttttgtagagacggggtctcactttgttaccagcctcccaaaatggtaggattacaagcgtgagccactgcacctggccaacatttttaatgtgtcagatttggctgggtctaaagtgtactagcagacccgccctcactgcattgagtgtgcctgtgggaactgtccaaacaggtgagcaaggggaatgccgagggctggggcaggcttggtgccacttagatgccaaagcccatgtgagggtagaggaggcatctctggggtctgggcacctgttattgaagtcccttctccccgcttcccagcagccggctcctcagtgggtgcccctctggcctggctcaggacattgcaaaggaaggatcagtgcaaattagcacctgactgtgtgagcacgtgtgtgtgtgtgatggagggagcgagatgattgtgtctgaggttgtgtctggttggatgttggccccttaacagaagcaaagaagtttggaggaggaagtcatttagcagaaaaggtgagaaagccattgtgcccttgtcgcctttgacatgtcccagagcaaacctgaaaacaatttgggatgtacctcaagtacaggtggggacaggggaaggagcaaggacttggaatcctttccacagagtgggagtggagaccatggggctgccgagatttaaatggggaagatgaatattagtgactctggtccttagctagtgtgagaccctaactaacccctccacccaccagccccctgcacgaccacccagtgtgcttttcctcatgtcagtatcatcgatatcatttggggcaggacaggtacacatgatccccacctggcagtgctgtttaaaatgggccatgtagaaggcagggactgtgtcttacgcatcgtgcttgcaaagattggctacaggaacggcttcttgagaaaggtctggggaaatgctttgtaatgcgaagcactacagactttcagagtaagaggtggtgttattaaaaaggattggatacattcatgggccaatgagctataggccatgattaaggaaactgaggcaagtttgagatcttgccgtaatggctcagattagctttcctcttttttttttttttttttttttgagacagagtcttgctctttcgcccaggctggagtacaatggtgcgatctcagctcactgcaacctccaccttccaggttcaagcggttctcctgcctcagcctcctgagtagttgggattacaggcacccgccaccatgcccagctaatttttgtattttggtgtagagacagggtttcgccaggttgaccagactggtctcgaactcctgagctcaagtgatacacctgcctcggcctcccagattatcttttcacgtaggatttttctcccctgtttccttccagcaatttgataatagcactaatgatcctgttacttttgtcattaaagttgcatttataaagggtttcatccttttttcctttttggactctaaaatgtatgcattgagctggactgaaatatgaaagtgcagttcccagagcggtttgcttagggaaagttgtgctgtagccctcaactccagtagaacttctaagactctctctcacttggttttttgtcccatttcccatccagatttggaacttggcttcaaacaaactcacatttctgaactcgtataaaatgaagatgtcggtgatcctgggaattgtccagatggttttcggtgtcatcctcagccttttcaatcacatgtaagtttcttgatgcactctctgcctgctctgtctgatcacactgatgatgaatggtgacagagccactggtttgggaactgcatctctctgtgcaagttttcttcctatgaggggtacttccctgggcatctgggcttgagccaagacaagctggttggctggaaatggcagcacctccgtttctcctgagcagagtctctccaaggtaagtgctcctctggccccagaaatatttgagggttcaaaaaaagactggaggccaggtgcggtgtctcacacctgtaatcccagcgctttggaaggccgacaggtggatcacctgaggtcaggagttcaagaccagcctggccaacatggtgaaagcccatctctactaaaaatacaaaaattagccaggcatggtgtcgggcacctgtaatcccagctacttaggaggctggggcaggggaatcccttggacctggaggcagaggtggcagtgagccaagattgtatcgctgcactccagcctgggtgacagagtaagactccatctcaaaaaaaaaaaaaaaaaaaaaaaaagagaaaccattcttaacttccaggctgtacagaatcagatgatagtctccattggcctgtgggccacactttgcagacccctatcttagagcattcttaggaaaaagcttccaggtccccattatatatcctcttgcctttaaatgtgcaactctgagctaggtctgcatgcgaagctgtagtcagatcaccaccctctctgtgtgggcatgacctttgctttagacgttacttctagaccgtggttctctctgactcttttgtgcaaaagcactttccagtatttcctttcaattttcttttctatgcatccatacaggattgctgtttgctgggggggtggggggtgccgttgtttgccagtagtgcaaaaaaaaaaaagatagaacattttgtgcttttgtgctttgagagaataattaagtcctaacgttcccttgatgttctatcttgtgtatgtgtgtgtcttccacccccagatacttcagaagaactctcaacatcattctgcaatttatccctgagatgatttttatcctgtgtctgtttggatacctggttttcatgatcattttcaaatggtgctgctttgacgtccatgtatctcagcacgcccccagcatcctcatccacttcatcaacatgtttctgtttaactacagtgactcttccaacgcacccctctacaaacatcaggtatttctgctatttttttttttttactcttcttttatttacttgattatgtcaaatttctctcctactctttttttttttttgagaaagagtcttgctctgtcacccaggctggagtgcagtggcgtgatcttgactcactgcaacctccacctcctgggttaaaacgattttcctgactcagcctcctgagtggctgggactacaggtgcacgccaccacgcctggctaatttttgtatttttagtagagacaggatttcaccatgttggccaggctgctctcgaactcatgacctcaagcaatctacctgctttggcctcgcaaaatgctgggattacaggtgtgagccaccgcacctggcctctctcctactcttgagtgttgcaaagagtagttatttgtaaaactgagccatcttggcatccagtggagggtgttacatcctttacatctcaaaagtgtcttattaaatgaaggtgcaagcactgagggctatagtgtggctccaaccattcttgttggggtaatacatgaaagggataattgcagagggattgaagattgtcttgtacattggctatgaagaaagaaaaaaaaataacccttcaaattgttaggcttgcagctgtagaatgttctatatggcaccttaatacttaataatcttttattcaaagagtgaactctagctaaattaacaagaataataattgaaatagaatcagaagacaaagccctgtattcacatgggcagacagtttctggaaaagcacgaatcaaactcatgctcttctgtgagcttccaaagctggcgggagctgctgttttcattttttgctcctcttccagagacagttcatcccaacagttgcactttattgccactctgatttcttccatttcttttagcctcattatcaacttaatattttatttatttatttatttatttatttatttatttatttatttatttttatttttggagatggagtcccactctgtcacccaggctggagtgcagtggcacgatcttggctcattgcgacctccgcctcctgggttcaagtgattctcctgcctcagcctcccaaggagctgggattacaagcacctgccaccaggcctggctaatttttgcatttttagtagagacggggtttcaccatgttggtcaggctggtcttgaactcctaaccacaggtaatccatccacctcagactcccaaagtgctgggattacaggtgtgaaccaccacacctggccaatattttatttttaaaaggtatacaaatcctattggggctggatataaaaataactcagtgagtaattctttgatgacacaaataacagtagctttttccccctggcctctcccagtgattaacctgatcatattatctgagggtagattttcactaaaaaagacccatttctataggtcctgattcctctggatgaagccctgtgactagttccacaaggccagctgcccttcagtgcagaggttgtctgttggggattgcacccatcagatgtcgtagttaatgtcatgcttctacggccatgccccttctcatgagttcagttcctagttgtgttctctttccctacccaagcatcaataagaaaaagaaaaggctgggcgtagtggctcacgcctgtaatcccatcactttgggaggccaaggcaggcagatcacctgaagtcaggagttcgagaccagcctgcccaacatggtgaaacaccatctctactaaaaatacaaaaaattagctgggcatggtggcaggtgcctataatcccagctactcaggagactgaggcaggagaattgcttgaacctgagaggcagaggttgcagtgagccaagattgcgccactgcactccagcctggacaacaagagcaaaactctgtctcaaaaaaaaaaataaaaaaagaagaagaagaagaaaaaatgccttgtaatcaggttttcataaggagtgagtgtagataagaatcagaaacaggtgcattactgttgggcaccattttgttatcacagatggtaaccatgagccatccccagaatgttgacatgaactgaacgtattttgaaggttcatttactcagtgctggatctaaacaaacatttatttggatttcccaaataactcttctgttttaaggcagagaactcagattcaccaaaatagttcgtgtgctaactgctttcattaagactgaagtcctcacttagtctggaataagcactgagcattgcacagtgaatgcgtggcttatccaactttttttccattcaaaagcattatttggagttggttggttttcacacaccctagtgtgaagattaattgtcttgatacagtttgaagttttcataacctcatttcggggttatgcagctggaagaggcaatacaagttaataaagtcccttcccaacattgtcctggctgtctttgaatatcaaaggatagccacacacacacacacacacacacacacacacacacacacacacactcatcccgttgctttgtacgtcatcgggggaaaatcctgttgcataaaaatggacaaagggccatgagacagcattgtgtgcgggtactaggatggataagttcagcttgggttcacatggtctcccttcctcttttggacatttaaaagtagagtgaggccaggcgcggcggctcatgcctgtaaccccagcactttgggaggccgaggcgggcggatcacgaggtcaggagatcgagaccatcctggctaacacggtgaaaccccgtcccgactaaaaatacaaaaaaattagccgggtgtggtggcacatgccggttgtcccagctacttgggaggctgaggcaagcaactcgcttgaacccaggaggcagaggttgcagtgagccaagatggcgccactgcactccagcctaggcaacagagcgagactccatctcaaaaaaaaaagttgagtgaggatggaagatggaaccgataaagtgttcactctattatcagggggaatcttgttacaattgggataataaattgtctcctggcatttactgcgaccttggtcagaatgcttggagaaacgtgaaggctcaagaaatgtttttctatttccttccagcaccgtgctctcaatccttctcagcagccctgaccgagccttccgaggctggctggttcttttgaccatagcagctatgagtcactcctctaaactggtcactggggtgtgtataagaaaggaggcaggggcgtgaggatgtgaaaggtgatctggagcaggaatataacagggactcctccagggtttcagcagaggcctgaagaccgcagctgcctcactccaaagggaaggcgagagagaccgagagtgagttcaaagtgggtaacccagagcctgttgagtaaattgcccacatggaagggatgaaagtcaggtagcgatggtgaggaacttcttttttcttttttaagagataggagcaagagagctcagataattttctaggactcaaaatataaaattaccggttgaatactgtttgtgacttaaagtgacccaaggacttttgagtaccaccgagtgactggtaaagtcatgaggcctgccatagttttcatgcaggcccaggtgaaaacgacccccatgggacagagttcaagacaaggggtgcctttataatgtttcatgcgtacttcttgtttaaaagattggttacgtatggtacaagggactactcagaataaggaatacagagagtttccagtgtctaccccgtgtcgaacatttggaaacactggacagatatttctctatctgcaaggggaatattccaggcgtgaaggtgaatggattcattgaaatgctttagatctctcaaaataaagtgctagtgaagtggcccatagtggtcattttcatcacgtaaagtgtgctgttctgccatgtgaaaatgatgagatctcgccattttggtcttgcagcaagaagtccaaagtttctttgtggttatggctttgatttctgtgccgtggatgcttctgattaagccgtttattcttagagccagtcatcggaaatcccaggtaagggctgtttgtttcagttcaccctactttgcataagaatgtgggtttctggaaagatgaatcttgggtttagagagaatcgtcctgggctgccagggccagaagaatggtgttgaggaactgacccgccctgagtatgtttcgttctgtggagctagacttttccactgggccgtcttatttccaacgagatgctctattaagggcaaacacgtttaagccttatgtctcggctggtcgcagtagcccacgcctgtaatcctagcactttgggaggccgaggcgggtggatcacctgaggtcgggagtttgagaccagcctggctaacgtggcgaaaccccatctctactaaaaacaccaaaattagccaggcatggtgatgggtacctgtaatcccaactacttgggaggctgaggcaggagaatcacttgagcccagggtggtgggggagattgcggtgagccgagatcacacttcactctagcctgggcgaaagggcgaaaaaccgtctcaaaaaataaaataaaataaaataaaccttatgtctgacagactttgttcagggtgtatgtgtgctgagtctcgtggtagttaatgatttataagggtctgaatgtggttgttttattagttataaataatattttattatgattttacttttaaaacaaatattaaaagcttttttcattaatattctaaagttgtgagactttactgtattatgttacagattgtgtcagggaattagaagagtaaacaaattcaattaggtcagtttttgtttgtttgtgatttttcccctgttgccaaataccaggttcagcccactttctctttttgtctaaactgcccctgagccttagatgtactaggggggtgaagcagagtttaatatcagcctgaaccaaataggatttagtaagattaaccttccagaggacatcagcgtctagctctgacacacagacggtttgagatggtcgttctctgctttcctctattagtgcaaaagattaagcggaatgtgctgagaccgtgtatgttttaaatggttgtagatatgttcagattaaattctatttttctgagatctttgttggatattgacctggacaggcagcagagtcagggacctagacatgacgagacttgagttcaggaagtttgtccctatgtgacgctctgtttctctgtcacctgcctctcctcccactgtctccttatgccagtccgaactcgttccaaagcttagctgaaacgtaatctatatgaggtattcataaagaggaagacaaagcaaggaagacttggttattgtttggttaactggtgggagagcaaggtggttgagggttgttgaggtgggtgcttgtccagacaggtgaccaagtatttcaaagagggtggcaaatacctgtttggagaagtagatgcaagttttttttgttttgttttgttttctagagacaaggtctctctctgtctctgaggccagagtgcagtggctattcaccagcacaatcatagctcactgcagcctccgactcccgggctcaagccatcctcttgcctcagcctcccaagtaacaggcatgcccccctgcctggctcagcatttttttttttttttttttttttttgagatgagctctcactatgctgcccaggctgctctcaaactcatggcctcaagtgattgtaattttttttttctaggaactaaatctgtccataagccaagagccaggttactgcaggctctcctgagttccaggactgtaaaataatagcttgtcttgctctttgtaccacacaagctctttaaatagttgctgatctcaaagtggtagatttctcctttgcgccaccagatgacttaaatagagggaaggagggagagagggttttcctagtctgccttcatggatgatagctctgaaactgactggtaacaggagctcctgaagacggcgtggaggcctgttcccttggcccttgggatgcacggctgttggttgtttcctcaggcggctgcttagggtccttttcgtgtcggaaacattaccacctccgttcaagagatggtcctataatggcattatttgccccttctccacctctccttcatgaaatcctacagacctaatacataaacaatttgttctgacggacttcaggtgatatgaacaggggtcctgtctattagcctctcctacaacctgggtccctgcagaatgtggcctgggaacctctccactagagggccgcctgtggcgtggccctggtgacatgccccgtgggcagcgagtgagtacacatctccttccgagagcccttgtggccagccaccaggccccccacgttctgtttccccttctgacttgctgctatgaacccaggtccccccatactcccacatctcaggtcacagtgaaataactgtgtgtttctatttaaaatcttcggccgggcacggtggctcacgcctgtaatcccagcactttgggaggccgaggcgggcggatcacaaggtcaggagatcgagaccatcctggctaacacggtgaaaccccgtctctactaaaaatacaaaaaattagccgggcgtggtggcgggcgcctgtagtcccagctactcgggaggctgaggcaggagaatggcctgagcccgggaggcggagcttgcagtgagccgaaattgcaccactgcactccagcccaggcgacagaacgagactctgtctcaaaaaataaataaataaataaataaacttcatttcaacatgtgcgttttttatggttaatgttattgaaacatataacatacagacaagtgcatgaataacgaggcaccaatccatgaagtatcgcagcatgaacacgttcgtgtcaccagcacttaaatcgagaaatgggtcatccttagaacttgagagtcctgaccgggcacagtggctcatgcctgtaatcccagcactctgggaggctgaggcaggtggattgcctgaggtcaggagttcgagaccagcctggccaacatggtgaaaccctgtctctactaaaaatacaaaaattagccggcgtggtggtgagtgccttataatcccagctactcggaaggctgaagcaggagaattgcttgaacctgagaggtggagatggcagtgagctgagatcgccgccattgcactccagcctgggcgacataagcgagactccgtctcaaaaaaaaaaaaagttttttttgccttcttcctgtcactcttaccccaagagcaaacattgtgctgacctccaggactgtcagttcgttttgcctgttcttgaactgtatttaaatgaaatcatccagaatgtcttctttgggatctatcttctctcatccaacattgcagtgttagtaattacaaatggtgatactataaacatccttgtatatatcttttggcacatgggtttgaatttttatttattttatgtatgtatttttagatagggtcttgctctgttgcccagattggagtgcagtggtgggatcatagctgactcacctcctgggctcaggcaatcctcccacctcagcctcctgagtagctgggactgcaggcctgcaccacaatgcccagctattttttaatttttttggtagagatgaggtcttgctatgttgcccaagctggtcttgaactcctgagatcaagtgatcctcctgcctttgcctcccaaagcactgggattgtaagtgtgagccactgtgcccagccacatgtgtttttagaaagttgccagtagctaatttacaatgattgctatatgttttatttcatacgccacccagcttaagcattgtgcgattttagtaagaggactgcaagtaagtatctggaaggaagatagtcactaggattcacaagtccagtatcacacttctacaaaattattcatgttcattttaactaattcaagaataatgagcagaaaagggtagagtttagggttggaaatggagaaaccgtaatatatctctcctttgatattttcttctataagttgaaggagagagaaaataggatttcgagatgacaaatataaagttaacttgagccacgtccctccccatgggataaagaaccacaaggtgttggggacagcctaacctagaagctggctcttggcacctggcaccctggactcttgtctagatggacctgagcccacttctgggtcctacagaggccttgttcctcagtctcctgagggcagaccaggccactggcatggacaccacgagtccctgggtggccaaggggcagctgtctgtagggaatgcgagcagaacttagacattttgggtcagggtgtctgtgtgcacatacaaggccctcatgatataggatgaagccagaggtgaaaaaaagagggctccctggtccagggccagctcccatgctgccatggcatggcgtgaattctgaatttcaacatagccttcccagtttttacaaagatttattttttaagctagaacccctatacacacactttttttttttttttttttttgaggcagagtcttgcttggtcacccaggctggagtgcagtggcgcaaacactgctcacttcagcctcaacatcccaggctcaagagatcctcctgtcctagcctcctatgtagttgggacaggtgctccctcagccaggctaaattttttttttttttttttttgagagatgggatctcactttgttgcccaggctgaccttgaactcctaggctcaaacatgaaacatattttatttaggaatttgttggcttgatgtataacttttaaatatttcaacctatggcatgtgaactactgtctttgctcttgcccagagccctgcaaatgttaagtgcagacctgctaaagaaaggagggccctggctgggtgtggtggctcacgcctgtaatcgtagcactttgggaggccgaggcaggtggatcacctgaggtcaggagttcgagatcaccctggccagcatggagaaaccccgtctctattaaaaatacaaaaattagctgggcgtggtggtgggtgcttataatcctgggtactcaggagagctgaggctggagaatctcttgaactgggggacagaggttgcagtgaaccgagattgtaccacttcactccagcctgggcgaaggagcaaaattccttctcaaaaaaaaaaaaaaaaaaaagaaaagaaagaagggtccagatacgttgatgcctaatttgcaatacccctcccatgaaatcattctagaaaaactttggacatgggacattaagcttcatggtgacttgaaagaaatataccattcacacttaggggtaaaaccagaccaagttgaatggtgactatgcctagatttttttttccttgaatttttcctaagctatttttatagttaatttcacaaggctacatggaaggtacgactgatgatttatgaccatgtgtatttcttttaacaatggaaaggcacttttgtacttgcattgctttagtgtcaagactataatttggcacattctggagcattgtggagaaaaagcacatgcactggagtcaggcaactgagtttgaattatggctctgccacttaccagccttgccagctgtatgatcttgggcacatatttttctttttttttttttttttgagacagtctcactctgtcccccaggctggagtgcagtggcacaatcttggctcactgcaacctctgcctcccagattcaagcaattctccttcctcagcctcccgagtagctgggattacaggcatgtgctaccatgcccaactaatttttgtatttttatggagatggaatctcgctatgttgaccaggctggtcttgaactcttggcctcaggcaatcctctcaacttggcctcccacagcactgggattataggcatgagccactgtgcctggcctttaacttttttttttttttttttttttttttgagatggagtctcactctgtcgcccaggctggagtgcagtggcgtgatcttggctcaccgcagcctccacctcctgagttccaatgactctcctgcctcagcctcccgggtagctgggattacaggcatgcaccaccacgcccagctattttttgtatttttaatagagacggggtgccaggctggtctcgaactcctgaccccaggtgagccacggtgcctggcctaatttttgtatttttagtagagatgggttttcaccatgttggccacgctagtcttggactcctgacctcaagtgatctgccagcctccgcctcccgaaatgctgggattacaggcgtgagtcaccacacgcagctgggcacatttcttttctttttttatttttattttattttatttatttatttttttgagacggagtctctctctgtcgcccaggctagagtgtagtggcacaatgtccgctcactacaagctgtgcctcccgggcacatttcttaacctttctgtgctgcagcttacttctctagaaaatagggtgataattgtgcttatataaaatggttgttgtgagggcttaatgagatagtgtagtgtttagaacagtgtctggtacataggtagtatttgaggagagcctttatttatatttatatgtgttagaattctcagggtgagttgagcgcattcctcatttccctgcttgttgtcagctgcaggcatccaggatccaagaagatgccactgagaacattgaaggtgatagctccagcccttctagccgttctggccagaggacttctgcagatacccacggggctctggacgaccatggagaagaggtatctgggacgagagcccctgaggaagactccccagtttgtacaaattctagaatggacataggcagtagagctgggtgggtctggagggccccacggggcagtagccctgtcactgctgagtcctgggaagctgtgaaggtctcagggaaggggacctactagctagtctaagaggatcagaacagctatttagcaaccaatctgggcacattttaatatttctagtccaagtaccgctgcatctgtatgtgtcaggtgaatatcagcctcggatctagtgacatagaaggtcctgcgtgtcactgaggactccttggctcagcaccacgcccctataagctctcttttttgtttgtttttgagatagagtctcactctgttgcccaggctggagtgagccaatttcggctcactgcaacctccgcctcccaggctcaagtgattctcctgcctcagcctctctaatacctgggattataggcatccgccactgcacccggttaatttttgtgtttttagtagagatggggcttcaccatgttggccaggctgatcttgaactcctgacctcaggtgatctgcctgcctcggcctcccaaagtgctgggattacaggcatgagccaccgtgcctggccccctatgatctctttataatgttatctgcctctcatgtgaattcataaattgttttgttccctcatccctccctgcccctgcctgtgcaaggacagccactgcccctcaggagcccgtgccacatcctcccagatgaaagcagctgtctgttccatgtgttgactgaagtcagccacatttgtgaatcccaagctggaggctttaaccggagctctgttctaatttgggagtgggaactgggtttccatgagggccacagatgctataaatggctccatttgtggtgttaattgcttattttaaaaagttttctcttgatagccatgtgtggtggctcatacctgtaatcccagcactttgggaggccaaggcgggcggatcacttgaggttaggagtccaacaccagcctggtcaacatggtgaaaccctgtctctactaaatatacaaaaattagccaggcatggtggtgagcacctataatcccagctactggggaggctgaggcaggagaatcacttgaacctgggaggcagaggttgcaatgagctgagatcatgccactgtactcccagcctgggcgacagagcaagactgtctggaaaaaaaaaaaattatcttgattaattagaattaatgaaaaatctcaatcgtgaaaattcttcccaagaaaattctaggtacagagtgatccacagtagtggctgttgacattaccaagtctgtcagacttgctggaatgttttagaatccaacccacgcatgttctgactcctcaagtcctggcctgtccagggcaacctccctcatctcttctcctcctgccctcaatctatatccagacaatttccacctgccacctccaacatgagcaggctgcccttgcttgggcaactttagtcaccattcatggacctctttcccccaggtctaatcatacatgggtctcccgtctccaggcaaatgtgtgcctccccctgtttctctttcaagttccttgcttgcttctctccacggtagggttagccaaactcaaggttaagggtgcagtccttgactgtcacatctgcccaagactgatcccagccgcaagtttgggggttcccagggccaccctcacttcaggcaagctgactatacattcgcaggacccttagggtcctttggggccaaaatgactcacagaactccggaaagtgctatgctgacagttgtttttgttttttttttttgagacagagtcttgccctattgcccaggctggagtgcaatggtgcgatctcagctcactgcaacctttgcctcccaggttcaagcaattctcccgcctcagcctcccgagtagctgggattacaggcacccaccaccatgcctggctaatttttttgtgtgtatttttgtagagatgggatttcaccctgttggccaggctggcctttaactcctgacctcaggtgatccgcctacctcggcctcccaaagtgctgagattacaggcgtgagccaccgtgcctgtccacttacagcttttgtagcaaaagaatttaaatcagacaggcagagaggatagggcagtatctgggacagtgagttccaaatgaggagctgtgtccttggaggcacattactgtccccacattgatgtgtggcaagatgtgcagagaatcgccagcctaggccggtcacccaagcttcagtgtccaaagttttactggagtttcctcatgcaggcaggattgactgattgattgactgatgattgattggtggatgcagccccagcagttgctgcagagtccccagctctctcccaccttgcagatcattcccaactctctaagcatgtggttggtctttctggtgtggccagaccccacttcaactataaggtgcccaacttaagccactgcattcgcataaacgatcaggtgtggtcccaggggcccagcatgaataacaaagaccctttcacgtgggaaatgccagtggtttagaggttacctcccaggagccaagacaaagccagtcctgttcggtaaggttaattatgattattataattactattttgagacagggtcttgttctattgctgaggctggcatgcagtggcacaatcatggctcacagcagccttgacctcctgagcccaagcgatcttcctgcctcagcctcccgagtagctgggaccgcaggtgcatgccaccacacctgcctaattttttgaatttttggtaaagatggggtctcactttgttgctcgggttggttctgaactccttggctcaagtgatcctcatgcctcggccttccaaagtgctgggattacaggcatgagccaccacacctggccaagatgaattctttcttatgcagttcttctttaccttgactctttctacctgctcactccatctctgcccatccctgtcccttcaattcctcacagctgctttcattgctaaattgaggttctcatttttatcttgtccccataacctctgacatcagtgactgcaccgccattccttcctggacgtctccctccgcagacatccgtgactgcaccccccccccccgccccgaattccttcctggacgtctccctccgcagacatccgtggcggcacctccccattcctccccattcctccccattcctccccattccgccccatgcctctccggatgtctccctccgcagacatcggtgactgcaccacccgccccattccttcctggacgtctccctccgcagacctccgtgactgcaccctccccgccatcccccccattccttcctggatgtctccctccgcagacatccgtgactgcacgcccccccttccttcctggacgtctccctccacagacatccgtgactgcattccccccttccttcctggacgtctccctccgcagacatccataactgcacacacacacacacacacacacacacacacacacacacaccgccattccttcctggacgtctccctccgcagacatccataactgcgcgcacacacacacacacacacacacacacacccattccttcctggacgtctccctccacagacatccgtgactgcatccccccttccttcctggacgtctccctctgcagacatccgtgactgcacccccgccccccattccttcctggacgtctccctccacagacacccgtgactgtacccccccactccttcctggacgtctccctccgcagacatctgtgactgcagcgtgactgctctagcttctttgatcttttcttttcctcatcagtttcttgttttgttatctcatctcactctttttttttttttttttttttccgagacagagtctcactgtgtcgcccaggctgcagtgcagtggcaagatctcagctcactgcaacctccgcctcccgggttcaagcgattctcctgcctcagcctcccaagtagctgggactacaggcatgcgccaccacccctgtctaatttttgtgtttttagtagaggtagggtctcaccatgttggccaggctggtctcaaactcctgacttcaagtcacccacctgccttggcctcccaaagtgctgggattacaggcatgagccaccgtgcccggccttgttttgttatctctgaatgaagatgtttcccaaggctgggagcgcctctttcttttcttttctttttctttttctttttttagacagagtctcactctgttgccaggctggagtgcagtggcgagatctcggctcactgcaacctccacctcacaggttcaagcgattctcctgcctcagcctcctgagtagctggattacaggtgcacgccaccacacccagttaattttttaatttttagtagagacgaggtttcaccgtgttcgccaggatggtctcgatctcttgaccttgtgatccacctgccttggtctcccgaggtgctgggattacaggcgtgatctcctctttccttgatctttcccttgttgatctcctccatcctcctgcagatgcagtctcaggagtccgtttccagccgggacttttcttcggggcttcggtagttccacctgagctcccatgtgcagagtgtctactgataaggcccactgccatctgaaactcagcatgtggagagccaactgcccacctcctctgtcaatgtcattcttccagctacttgggcttaggagcctcagagccctggctgccctggccctgagtgggtaaggggccttctctgtgttcccacgataccactgcatgccctggtcattgcgcttcccagagtgtggcatgggaacccttctacatattctcctgactaggctgtgagcaacttgagggcatgtacagcaccagtcaattgtcccccatggccaggcacagtggctcacacctgtaatcccagcactttgggaggctgaggcaggcagattgcttaaggccaggagttccagaccagcctgggcaacatggtgaaaccccatctctacaaaaaatacaaaaattagccaggtatggtgatgcatgcctgtagtcccagctactcggtaggctgagatgggaggatcacctgaacctgggaggtcaaggctgcagtgagctatgattgtgctactgcattccagcctgagtgacagagcaagaccctcccccccccccaaaaaaaaattgtctgtcacatcagagagcatgaggggagaatgagctatggctgtcttcttcgttctgttatttacttctttcctgtgttactgagctcataaccaaattgtccttttttttttttctttaaggctgtcccttctctaaactatgatgctaccagagtaacctgcctctatggctcctcactgaatccaggttgtttcttcaactttacccatagcttgcctttctagaaacttccacacaggaggactgtcttctattcctcacctaaacaagctcccagttccagccaaattgttttctttccgacttgactaggtgatattcccagctacctgtttctttcccaaccagggatccttttgctcctcaggaacaatttcttgtccttcaagtcacattcctacccagccttcctggcacagcacaaatctcatctccccttaccacccatttgtcatctttgagctttttttcagctattgctggggaacgttaagacacacataacatacgactttgtgctgataattctttctctaagtctattactatttcttttcccctagttagactgaaagtgtctgaacagcaaagcccatgtcttattcatctttgcatcatttggaataacttttgtgtagaaaattctcaatgaagtaaaataaacaattccgtctttcagttcaactttggagacgtctttgtccaccaagccatccacaccatcgagtactgcctgggctgcatttcaaacacagcctcctacctgcggctctgggccctcagcctggctcatgcacgtgagtgagcagcccatcggggggacagtcagctctccccaacaccccaggaaataggtgccatgtatttggaagtaaaggtgacttctccgagctatttgtggatgtttgccaaaagaatgactcttctttcccaggcacaggtgccttttctgtgggtctggctgcacgttgctggggtggtcaccctctatattaatagtctcctactgctgctgtaacaaattgtcacaaacactcgtggcttaaaacaacacaaatttggccgggcacggtggctcacacctgtaatcccagagctttgggaggcagagtttgggcgaattgtttgagcccaggagttcaagatcagcctggccaacatggtgaaacccgtctctactgaaaatacaaaaattagctgggcatggtggcgggtgcctgtaactctagctactcggagactgaagcaggagaattgcttgaacccggaaggcagaggtcgcagtgagccgagatcacatcactgcactccaccctgggctacagagtgagactccgtctcaaacaaacagacaaacaaaaaacccaacaacacaaatttggtgtcttccagtttttgaagccagagtcctaaaatcaaggcgtgggcagccgtgctcctgctgcaggctgcaggtagaatttgtttcctggcctttccagcctcttgaggctgcctgcattctgtggcttgcggctcctctttgcatcacttcaacctctgcttccagcatcaaatctcctttttctctgactgtgactctcctgccttcctcttacaaagactctagtgatgacattgggcatatccagataatccgggataatgcccctctgtcaggattcttggcttaatctcatctgcaaagccactgttgccatgtaatatagtatgttgacaggttattaggattagaattaggatgtagacatctttggggatgggggaacatattttttcaggctaccatgcccttctgcaaggtgctgacctttaagagaacgcctgccttggttatgagcattgcggggagtcagttggctgcctgctgagctgaccctcaggaagtgctcaccacctttgtgaattcacagcagtccaggatcagtcaggccaggcccagaaatacaattgtatctatctatctatcatctgcctgtctgtctgtctgtctgtctgtctatctatctatctatctaaaagagacaaggtctcactatgttgcccaggctgatctcacactcctggcctcaagggatcctcttgcctcagcctcccaaagtgctgggatttcaggcattggaaatacagttttgataaagatccgagcccctggggttgcctaacgtcaggaatcatgactcaccaactcacttgtaagccccatcttgatctctgggtccttctccagtcttgtttcttgtcagttttccttagtgccccagcactccagacccatccgtttcatatgcagtggccctgaggagcgttttttttttttttcctaagacagggtctccctctgttgcccaggatggagtgcagtggcgctatcacggcctcgaactcccaggctcatgtcattctaccgcctcagcttcccaagtagctgggaccacaggtgcatgccaccatgcctgggccaattttttttttttttttttttggtagaggtagggttttgcctttttgcctaggctagcctcaaactcttgggctcaagcagttctcctgtcttggcctcccaagtagcagggactataggcacacaccaacatacttggcgaacttttttttttttttggtagagacagggttttgccatgttgcccaggcttgtcttgaacttctgggctcaaacagtcctcctgccttggcctcccaaagtgctgggattacaggtgtgagccattgtgcctggcctgaagaactatctcctgaagacgcagtactccctgggcccctctgtgtgtttgcccctgcagcccccttgcctgaaatagtcccttctttaattctctctctatctgatatttaattcgtccttcataactcagctggaaatcttctttcctagtcccccagtctggaagatgccttcctgtggttctggggcatgctcttaacctagcttcaattataattgtcttgattagcctgtcttcctactggactatgagctccttgaaagcaaagaacctgacttttatcttagcattcctggcactgagcataatgcctagaacagagaagccaggccaaggtgtgtgctgaagggatagaaacgaaactccagtactcagcattcgtgtgatcttcacagctcagctgtgttcatttcctcccacaaactcacatacacacactttcacatgcacatgaacgctgatgcacacactcagccctgcaagtggctgcagcacagacacccataagcatatctttttttttttttttttttcaggctggagtgccgtggcgtgatctcggctcactgcaacctccgcctcccaggttcaagcaattcttctgcctcagcctcctgagtagctgggactacaggtgcacaccaccatgcccagctaattttttttttttttaatttttgtattttcagtagagacggggtttcaccatgatggccaggatggtctcgatctcttgacctcgtgatctgcccgcctcggcctcccaaaatgctggaattacaggcgtgagccaccgcgcccggccgcatgtctttactcctgtgcactgctgtgcattcatgtgaagtggctgtcccaggactgtcacctacttgttccttagagtggatctcagcgcttcgtgcagtcagtggtggtaatgttggtcttcagctctaaccccagcagtagttggaggacttgagtcataatagggctgagtctagataagacaggaggaggagttttggtattcttggccctatgtgtcggggtgtcctctggccagcccatacacacactgagggggtcatttgattcctaaaaacccatatggttcatggctgcctgccctgattcacccactgggtcattctagaagtccctgctagacgtggcttccagtccatactaacacagttgcttaaagaggtaatgtggaaaaatggggaaaaaattaaaacactgacttaaattctggttccttttctaccacttttggttgagtaacttatacaagaaatttaacctttgtgtgccggggctttcatcagtggtcctagtagttagcctcctgcactggtcaggttaggctaaactctgttgcaataacaacttaccctctaaatctcaggtccctaggccagagtttggcactatgtgttggggtgtcctctggccaaaattcctcctgtcttatttagacccatccctggtatgacccaagtccttcaaactactgctgaggttggagctgaagaccaacatcaggaccacggatgacttgaagcgctgagatccactttaaggaacaaagtggggctgggcgtggtggctcacacctataatcccagcactttgggaggccaaggtggtggggggattacctgaggtcaggagttcgagaccagcctggccaacatggtaaaaccccctctctactaaaaatataaaattagctgggtgtggtggcacacgcctgtaatcccagctactcgggagggtgaggcaggagaataacttgaacctgggagctggaagttacagtgagccgagatcacaccactgcactccagcctgggtgacagagcgagactctgtctcgaaaaaggaaaaaaaggaacaaagtgggtgacagtcatgggatagccacttcacacgaatgcacatcagtgcacaggagtaaagacatgctcatgggtgtctgtgctgcgggtacacgcagggctgagtgtgtgcatctgagtattcgtgtgcacgtgaaagtctgcgtatgtgagtttgtgcaaggaaatgaacatagcctgagctgtgaagatcacacgaatgctaagcactggagtttctactgtaaatctcaggtacgggtctaacccgacgggggtgaagctgctcccattgatgaaagactctgcatcactgtagcaggcagaaaaccagatcttggggggcagcaagcaaataggggtcctcttccttgcgttccatgtctctgcgtttatcatgttctgatagccgcttgcaagtggcaggcctgtgtctctctgggctacatcattgtgaccttttagcaggggccttcaaatctcaagccaaggatgtaatgatgctatttccctgcaaggtgcatatcccaggctgttgggcatgataactagggaagaagcattcacacgtgctctgtgaccagggacacctaagcatggacccttacttgcataggttggacagtgagagcccttgtagggcagttagctggggacacgggctcagctacgagtccgggttttttccgatccccatccatgacctccctcctcttggatttcactcccctcagggccttttaaaacattccccgactgtcagcctttgagagactccatgggcatgtaagaaatgtgtagaaaagacctttagagctgggggtgtgggaaacagctgaggaggtaacgggtagggaagtgggggtggggggacggtggtgtcataggaacaggccagagggggctgtgtggcatttgcccctgaacttttcggaactttagtttccttatctatgagatgggcatcataaaacctaatttatagggttgatatgggccttactgggataatatgtgtaaactgcttcgaattcctctgacttggctcttaatttggagtctgtggctgaacttcaggctttctgtaaatcccctgaaactacgtataagatgttgttgggcgtctctgtgtgcatttttctggggaaaggattcatgactttcttcagattccagaggggacccgtgaccaccaaagagtgaaaagagccactttcccgagtgaggctgaattcacctcctgtgctcagtacctggcatgtgcccttgtacattgcagtgactgaataaatattagctaaacgttttttgaaatgtggttaggatttcaatctttttaaaaacatttttactttgaaatatagcatgtttacaaaaatgcataaaatatatattcagcctaatggatttttgtaaagcaaacactcatgtaaccacttcctggtcaaagaagaggctgtggctgggcgcggtggcttacgcctgtaatcccagcactttggaggccgaggcgggtggattatgaggtcaagagattgagaccaccctggccaacgtggtgaaaccccatctctactaaatatacaaaaattagctgggtgtagttgcatacacctgtagtcccagctactcgggaggctgaggcaggagaattgcttgaactcgggaggtagaggttgcagtgagccaagatcacgccattgcactccagactgggcgacaagagcgaaactctgtctcgaaaaaaaaaaaaaaattaacagacagtggcggcacacttctgtggtcccagctacttaggaggctgaggtgggaggatcactggagcctgtgaggtcaaggctgcaatgagccataattgcactatggcattccagcctgggtgacacagtgagaacctgtctcaaaaaataataataaaataataataatctgggctggatgtggtggctcacgcctgatttcccagcactttgggaggctgagacaggaggattgcttcaggccaggagttggagaccatcctaggcaacagagtgagaccctgtctctatttaaaatatatatatatttttaattaaaaagatgagaaaatacaataaataacaatctgcatttacaagataatcccagtggtttctcgtaccttgcagaaactgtctgaagtgctctggactatggtgatgaacagcggccttcagacgcgaggctggggaggaatcgtcggggtttttattatttttgccgtatttgctgtcctgacagtagccatccttctgatcatggagggcctctctgctttcctgcacgccctgcgactgcactggtaaggatggttgtcccctggaagctcaatgtggtgttgggaaagggagtgggctgtggggccagccgactgggttcagatcgtgagctgtatgtgactttagcagcttacatacctctttggagccttagtttagtcatctgttggtgtaatattaaatgatgtaatatatgtgtatatatatgtatatatacatatatacacacacactcattcatacttattcagactctcatatatgttagttctcatttactccttcccttttagatgatcagtgttcatttgttattacaattggctttaacccaagtgacatttccaagtattggcaaggtggcatctgagataggctcacagaagacatgcttagaaaatctggaatatttggctttttttttttttttttttttttgagacaggctctcactctgttgtccaggctggaatgcagtggtgcaatcttggctcactgcaacctccacctaccgggttcaggcgattctcctgcctcagcctcctgagtagctgggattacaggcgtctgccactacgcccagctaagttttgtatttttggcagagacggggtttccccatgtttgctaggctggtctcgaactcttggcctcaagtgattcacccgcctcagcctcctgaagtgctgggattacaggcatgcaccgtcacacctgactaatttttgtatttttagtagagatggggttcccctatgttggccaggctggtctcaaactcctggcctcaagtgattcatctgcctcagcctcccaaagtgctgggattacaggcatgagccactgcgcccagtgaatctgggatgtttggctcttgttgctgagtagaggagttataccaacaaggtatgaaaatctcaaaagtggaaagagaaggagggtaccaccaggagggagacgctcaccgggagccctggacatgcacagatgtatccagtgacaatcagccgtcgttaggttgatgaatatggaaacatgtttaggcctctggttgtcttccaagttacatttcaaccaagaattctgagtgtgcagtgcatgcccttcagctgcagagactgtacccagcttgccctgatgttttcttcctccctctatggccactattcataaagaagcctttgcacttcatgtactgagtgaggagagccacagcatcccctgcctccatgatgacgtcattcccctccatgtcattgaggagaggaactgaactctgtaaattaataaaacataaatgaggctgggcacggtggctcatgcctgtaatcccagcactttgggaggccaaggcgggcggatcagctgaggtcaggagtttgtgacctgatcgacgtggagaaaccccgtctctactgaaaatacaaaattagctggggtggtggcgcatgcctgtaatcccagctactcaaggggctgaggcaggagaatggctggaacccgggaggtggagcttgcagtgagctgagatggagccactgcactccagcctgggcaacagagcgagactccgtctcaaaataaataaataaataaataaataaataaataaataaataaataaataaataaaataaaacataaatcatccgacatggtatcagttatgtgagttacaaaaatacaggtcaagggtctttgcgttctataatatgtgagtcccacattttagaattagctggaaatggaaaatgacatgagagagtgctgcacagtgagggtgtcttggcttgtcatgggggtggggaagctccttccatgaaggaagagttgttatgctgtgaccatgagcccacaagcagagaggcctggaggaaatgaaggggaggggaaggggaaggtggtaagagacagatgagagaagggcttaaaaaatcctcagattcatggcctggatgcagtggcttacacctgtaatcccagcactttgggaggctgaggtgtgtggatcacctgaggtcaggagttcgagaccagcctggccaacatagcaaaacctggtgtttactaaaaatacaaaaattagctgggcatggtggtgggcatctgtaatcccagctactcggaaggctgaggcaggagaattgcttgagcctgggaggcagaggttgcagtgagctgagatcgcactattgcactccagcctggaccacaagagcaaaactctgtctcaaaaaatatatatatataatatatttatttttatatatatataaatatatatataatataatatatattataatatatatattataaatataaatataaatataaataaatataaatatatttataatataattattatatagaatatataatataatatatattctatataatataatatatattatataatatattctatataatataatatattatataatatatataatatattatataatatatataatatattatatattaatatattaatattgatgtatatataatattatatataataatatatatgatatattatacacacacacacacacacacacacatataaattagctaggcatggtggtatatgcctatagtcccagctactcaggaggctgagacaggagaatctctcttgaacctgagaggcggaggttatagtgagccaagatcacgacactgcactccagcctgggtgatggagcaagactctgtctcaaaaaaaaaaaaaaaaaaaaaatcctcaggattctcatggcagccatcagcctgggtgcctgccgtggccaacccttctgactttgtgcttgattttacgaacgctctgcttcctccttccctccaccttccagcctctaactgatgtgtttcaatctcccatttcttaccccacggcctcccctcaacaacagggttgagttccagaacaagttctatgtcggggatggttacaagttttctccattctcctttaaacacatcctggatggcacagccgaggagtaggctgagggctgcacctcccacggtggtcaccatgccaatgaaggaagttcagtcttgtctttgatatcagcccctgcaaggcgctcaatgggaaggttgttcttggctcacctgaagcatgaaactgtgtattatttggacgtcagcctgtggatttgatacgacttaaccacgtcagaggaaggactttggcaagtgatattgtcttcatgtggggtattaattctcaaataataaagtaattgacaaatgaggggagaatgctaaacagatgtcttcttgcaatattttaaatattgtatttgagaaaataaacatctgagtcattcactttttccttaagatgtctttattcggccaggcacagtgactcacgcctgtaatcttagcattttgggaggccgaggcgggtggatcacccaaggtcaggagtttgagaccagcctggcaaacatggtgaaactctgtctctactaaaaatacaaaaattagctgggcttggtggcaggtgcctgtaatcccagctactcgggaggctgaggcaggagaatcgcttgaaccccggggggctgaggttgcagtgagccgagatcacaccacttcactccagcctgggcaaaagagcaaaactccatctcaaaaaaaaaaaagatgtttttactcaaaattattccataccagtctgggcacagtgactcacgcctgtaatcccagcactttgggaggctgaggcgggtagaatacctgaggttgggaatccaagaccagcctgaccaatatgttgaaaccccgtctctattaaaaataaaaaattatctgggcatggtggcaggtgcctgtaatcctagctacttgggaggctgatgcaggagaattgcttgaacccaggaggtggaggttgcagtgagccgagatcaagtcacctcactctagcctgggtgacagagcaagactccatcttggaaaaaaaaaaaaattattccataccatttactactgacaattataggccaaagctgaacaatagagctacacaaactaatcccagagaaggatcatgcatattgtatttcctcatttcctccttcctcaaacacctttttccgttgtctagggctaagcattacaagcttaggaactttctcatgaattttcactgaggaagaagagataatgttctctgtttggagggagggccgcccccggtgtggctctctggttgctaaatcctgtgaaatgaagtgtggcaacatgacatcatcgaggactttgtttactgtcaatgcacgttatgctggagtaactggagaaagagatttggaggcttcgacaagttcagaaaatggtgtgctgggaggaaaaccaccaagaggtctggcccgttactccctggctctgtgggcaccaaagtcattagtcatttcttaagtgcctgcactaacaaactcctaagagtccgataagttatatatatgatacacaagatatatatcatatatgatatatgtgataaacaagatatatatgtttgcatatatatatagagaggtagggtctcactcttgcccaggctggagtgcagcggtgagatcacagctcactgcagcctcagcctcccaagctcaaatgttcctcccacctcagcctcctgacgagctgggactacaggtgtgtaccaccatgcccagctaatattttttagtttttttgtagagttgccgtgggtagggggtgtctcactgtgttgcccgggctggtcttgaattcctgggctcaagctatcctcccgcctcagcctctcaaagtgctggggttacaggcatgagcacccggccccactgactgttttgtctgaatggactttatccatgtaggttattatcttcatggtaactatactgatagaattaagtataattatctttttttttttttagtgcttttaaaatttacaaaataatagtatcttatttaattttaaattttctttttctttcttcttcttttttttttttttttttgagacagggcctcactctgtctcagggacttgctggagtttagtggtgcaatcttagctcgctgtgacctccggcctcccaggttcaagcaatctccagcctcagcctcctgagtagctgggattacaggcaaccgccaccatgcatggctaatttttgtacttctagtagagacgtggtttcactgtgttggccaggctggtgtctcgaaatcctggcctcaagtgatccgcccgccttggcctcccaaagtgctgggattacaggtgtgagccaccgcatctggccagttctaaattttcattgttagtaaagttctaaaagagctgattaaattcaaaatatgctttggatgagaccctgttttttaagtgcctacgtgccctgtgtgtggtaaagctgattggtgctcatggaagcggcattgctcaaacctaaaaggaagcttctgtgtcaccttccatgtcagtatcatgacttttccagcacagtggaaggcacatattagatgctcaatattcacttaatgagattgagcaaaagaatgatagctaaggtcagaaggtgtacatgtttgagtcccaactttgatgctttatcatgagtgccctcaggaaagaaatggagttgttcccctcattgccgaatggaaataatgatctccacctctctggactgtagaaaaggtggttgtaaagccctgggtgtggaggagatactgtcagtgatggttgaactgggagaatagactaagacagcatgcaaatggagggataagaaatctaccaatcccatgctgccatggccactggacgattttcaggttctcagctcacaaatgtccttctcaacaactatctaaaaagaaccctgtgcttaaatggatcaccagcctgttgatccttaagtctattttttttttaatttttatataccactgtgtagttttaaattagaattaggccaggcatggtggctcacgcctgtaatcccagcactttgggaggtcgaggtgggtgaattgcttgaggccaggattttgggaccagcctggccaactggtgaaactcctcatctactgaacgtatgaaaattagccaggcatggtggtgtatgcctgtaatcccagctactcaggaggctgaggcaggagaatcacttgaacccgggaggcggaggttgcagtaagccgagatcacgccactgcacttcagcctgggagacagagcgagacaccatctcaaaaaaataaaaacaaaaaatttttttaaagtaaaaaattagaactacctaaaagacattgcacctttcaagtgtatgacagtgtaacagtgtttaacagttgttttattaagtgaatgcttgaacgtattcaacattaaattcaatttacttcacagtaatgtttgcaaatacattatcacttcttaaatatttcaaatcaagcaacttgaagttcagaaggcttgctctcaaataactcttctacagtgacgcaaagactgaaaggagcctacaacttgagtcccagtctctaaccaacaatgactgtgtcctcactggtgaacccatatgagggagctccaagctcaagaggggcaggccccttccagatcctcccagatgcatctgtgtgacccccagcaagggcagtaatcaccaccaaaatcttcatttgcaataggtgtacaacaggatgaatgcaaacgcctagtaaagaaactcgaatgggttaccctgataggcattgcactcattctttactccttttttatcttttttttttttttttcagacagagtctcactctctctcccaggctggagtgtgcagtggcgcgatcttggctcactgcaacctccgcctcccaggttcaagcacttctcctgcctcattctcccgagtagctgggattacaggcatggaccaccacgcctgactaatttttgtatttttagtagagacggagtttcaccatgtttgccaggctggtcttgaactcctgacctcaagtgattcacccgccttggcctcccaaagtgcttggattacaggtgtgagccaccactcccggcccatcctttacttcttcttcttcttcttttttttttttttttttgagacagattctcactgtgttgcccaggctggagtgcaatggtgcaatctcggctcactgcaacctctgcctcccaggttcaagtgattttcctgcctcagcctcccgagtagctgggattacaggcacatgccaccacgcctggctaattttgtatttttagtagagatggggtttcgccatgttggccaggctggtcttgagctcctgacctcaagtgatctgcccacctcggccttccaaagtgctggaattacaggcatgagccactgtgcctggcccttaaatcatgctatgggccctcagctgggactcttcaactgcaggttcttggtcaatttccttcttggttctgtggcatacaaacagggatttgcctctccatttgaaagccatgttcttgccttctggaatatcaaataacttgattgcaattttcgacacggccgactcatcagcagaagcactgatgctggaaacaaactgggagatgacattcttggcagcatatgtgacacccacagcagttgttgcagttaccaaataggagaaccctttcctagcctcgccatcctcttttgaagactttgtcccatcaaaaatctcaatgcaacagtaatcagggaagtcaggcacattgatgtctgtatgggaataacgaacagaagcagggacattgaggcccacagagttgacccaagacaggctcatggcctggccactcagtgactcctggcatagcaaaggctgctcttgtacagcacaggcagcttcagggtggcaggcaccatggcctataccaggggctacagcatgcctgccaccctgcaggatatggctgacaggatgggcatgaacctgctccttaattctaagcaatggctgtgagcaaatgtttgcaagggcaaagcttccctctgccccttgcctaggtcttctctttcagaaattcttccagctgtcctgagaacaacatagtaatttcctccaaagttcggcagcctctttcagtcttaacaagaaatgtaatttcccctttaaaaggagatcaagtgcaggctgctgagaagagggtgtgccctaggtgt

SEQ ID NO: 2144 - protein, 821 aa, Homo sapiens [sequence omitted]

SEQ ID NO: 2145 - DNA, 20300 bp, Homo sapiens
  source (1)..(20300)
  CDS (201)..(356)
  CDS (1537)..(1654)
  CDS (2624)..(2893)
  CDS (2920)..(3159)
  CDS (7553)..(7667)
  CDS (8025)..(8203)
  CDS (8414)..(8849)
  CDS (11846)..(12057)
  CDS (12746)..(12861)
  CDS (14055)..(15351)
  CDS (20000)..(20100)
cgctccagccattcagcagctccgcctggacgtcaagggcatgtccaaaaccgcgctcatgatcttcctactcccccatccctgagatttatcctgtggctgtggtgtcctgtggctactgtaacaaatgaccacaaacttggtggcttcaaacaaatttaatctctcatggttctgaaggccagatgtccaagatcacgatgacggcaaggccgcgctccctctggagactgtcggggaaaacctgcccctttcctcttcagcttcaggtggtggctgccatgccctggtgtttcctggcctgtgaccgcatcattccaatctctgcctccatcttcacgtggccttttctgtatgtgccggtctaatcttcctctgcttctctcttattttttgttttttgagacagagtctcactctgttgcccaggctggagtgcagtggtgtgatctcggctcactgcaaccgccacttcccaggttcaagcaattcccttaacttagccccctgagtagctgggattacaggcgtgcactcagcaaatttttgtatttttagtagagacgtggtttcaccatgttggctaggctggttgtgaactcctgggctcaagggatccaccagcctcagtctcccaaagtgctgggattacaggtgtgacccactgcgcttctccctataagagaggccttcctctgcctctctcttatagggatacttgtgatgccatgcaggacctgcccagataatccaggataaccttctctccaaatccttcccctgatcactcctacagatctcttccatagaaggtgacatttccaggctctaggaattaggacctgctctctctgggtggccgttgttcactccaccaccccaggtttccccatcctaccaaaagacacagcagcattgtgtcaactgcccaaactgaaaacctatgagttattctcgacctgacctttttcctgagcaagttctgtggatttaacttagcggtcacactgccaacttcaaccgaactccactgccaccaactcagtccaggccaccagttcttgtttaggtgactgccatgacccccattggtctctccctgcctcaactctgtcccctccatcctatatccccacactgtaaccagactgattatttatttatttatttattttttggggaaagaagcttgctctatcccccaggctggagtgcggtggcacaatctcagcttactgcaacctccgcctcccaggttcaaacgattctgcctcagcctcccaagtagctgagattacaggtgtctgccacaatgcctggctaatctttgtatttttagtagagacgggttttgtcatgttggccaggctggtctcaaactcctgacctcaagtgatccacctgccttggcctcccaaagtgctaggattacaggtgtgagccaccgcacctggccagactgatctttaaagaagtatacatgaacacagcactccatgacttaaaacccttaagaggactaccatttatctcaagataaaagaacaaaatcctcgctgggcacagtggttcatgcctgtaatcactgctttgggaagccgaggtgggaagatcactttaggccaggagttcgagaccatccatgggcaacatggtgagaccgcatttctacaaaagataaaattagctgggtgtggtggtgcacgtctgtagtcccagctacttggagggtgaagtgggaggatcacttgagccctggagttcgaggctgcagtgagctatgacggtgccactgcactccagcctgggtgacggagtgggacctcatcaaaagcaaaaacaaaaccgttattgtggctttgaggcctggatcataactacatcatttaatttggccaaaccggcccatttcaggtacccaaataccccacgtgctttcttgcttggctctgggactaatgtggttactggtgcagggtgagtggcaggtatcatgaaccacattgtggacctggagttgctaggaccttttctgccattacacagaaaaatcctccctgagaacacagccattggaggacacatggcagaggaagataagacaataaacagagacacataattatggccagcgtgggggctcacgcctgtaatcccaaaactttgggaggccgaggtgggcagatcacctaaggtcaggagttcgaggccagcctggccaacatggtgaaaccccgtctctactaaaaatacaaaaattagccgggcgtggtggcacgggcctgtagtcctagctactccagagggtgaggcaggagaattgcttgaacctgggaggcggaggttgcagtgagccaagatcgcgacactgcgcgacagagtgagtctttttgtctgaaaaaaaaaatatatatatatatatatacacacacatacacacatatatatatacacacacatatatatatgaaatgaccaatacacatgtgaacatattcaacgcaataactgcggttaaacagcagtaaaatcccattatttatccatcagattgacaaagactgaagaactggagaagaagtggcgaaacgggctcgcagcgtcgcattccctaccccagcaggtgcgcccgcagcgtcgcactccctagcccggcaggtgcgcgatcacacacacaccctgcagggggacttcgaccggcacttccggtcccggaagggcatgcccttggaccccggaagtccgggcgggggcagagccgggtgcgctttgcgacagagccgtaaaggcgcgcgggaacatggggctgtacgctgcggtggcaggcgtgctggccggcgtggagagccgccagggctctatcaaggggctggtgtactccagcaacttccaggtagcgggcccgggcgccacaagtaggggtggggggtgaggaacccggggtggggtgggacgggcccggatggggtcgggaggtggggcccggcgaggagggccgggggagcccccgacccagcttgtctccctcggccacacagaacgtgaagcagctgtacgcgctggtgtgcgaaacgcagcgctactccgccgtgctggatgccgtgatctccagcgccggcctcctcagtgcgaagaagctgcagccgcacctggccaagggtaggggcggggcggggaagtgaaccccgacggtcagcgctttgtcatctggtttcagccccgctgccgtgcacggcgggactggagcaagtcgctcacctgaaatgagtatgagcagaccttccctgggttacgaattgagatgggatgaaaatgctttaacttcgagtgttttgaaggattaaataaccgaagtacaaagtagtagtagcggagacagtaaggaagtcgggcgtggcggcgcgcacctgtggtcccagctactcggaaggctgaggggggaggatcacttgagcccaggagttcgaagctgcagtgagctgtgatgtggccactgcacttcagcctgggcgacagatctagaccccattctaaaaaaaaacaaaaaccccaaacccacacccacgaaagggtaatgttggcaagaagttgggtgcagaggtctactggtgaacatctgtggggaaagggtctaaggctgggaagcgagacgccaggttccgatcctgttgtgtagttaatttctggtgtggtcttgagtaaggtaccccacctttatctgtaaccatctagtcaggtgatctctttagccattccagtgcccgggctctattagagttagttctaaggcattcatacttcttgcttagggcgtttctgtctttgatccctcatccccaggtgctagtgtatgagttgttgggaaagggctttcgagggggtgggggccaatggaaggctctgttgggacggcaccaggcgaggtgttgagttggctcggctcaaggttcttcggggtgtgagctggcatgaggacctgttggaagtgggatccaggcctggtccaggtgagctggaaggagttgaggggcgggggaggtggggaactttgctcctgcctactcactgctcattgcgtcctacctagcctcccagctgcctcgatttgtgcgtgtgaacactctcaagacctgctccgtttatgtagttatttcaagagacaaggtttctcctatcagggtcgggcttccaggtgagagcttagagccctggctgtcctcatctagggaggtgtctggggtactgggaagagaagtggttggatagttgtgactttgctctctgggctttgttcctacctttccagcagtttctccatctccaaggtttgttttcctcgcatcccttaaacatcgaactcctaggagccccatcctacattcttccggagctctccgttttttctctaactttagctcctgcctcccacctggtgattctcaccgcccagtgtagacttcccttttgcattcttccctccttaggttcacatgaatgcaccacagatgccacagtcgctgcattcatctttcctctcagactttacacttagtacatccccagtttaatctaacagatgtcaccgttttccacccatttggtcaagccagaaaccgagtcatcctaggtgcttccttcccctccctccaatcatttactcctccaccttgagcatctttctcagctccactcctttttttttttttttttttaggactgagtcttgctctgtcactctcaccgaggctggagtgcagtggcatgatcttggttcactacctccaaggttcatgcaatgctccttcctcagcctcctgcgtagctgggattagaggctcccaccaccatgtccagctaattattgtatttttagtagagatgaggtttcaccatgttgaccaggctggtctcaaactcctgacgtcaggtgatctgcccatcttggcctcccacagtgctgggattacaggcgtgagccacagtgcccggcctccactcctttctcttaattcccccggacactgcctaggttaagcactcatttcttattgggatgaccacaagaacttcccagactggtctctctgcttccagactgtctcactgcattttccttgaggttgactgtaggaagctctaaaggcagatctgatgcattactcctctgctaagcctttttttttttttttttttttgagagagttttgctcttgtttcccaggctggatggagtgccctggcgcgatctcggctcaccgcaacctctgcctcctgggttcaagcgattctcctgcttcagccttctgagtagctgggattatgaaggggtggcctgcccctccacatctgtgggatatctcatcaggtgggacaagagactgagaaaagaaataagacacagagacaaagtatagagaaacaacagtgggcccaggagactggcacttagcataccaaggacctgcaccagcactggtctccgagttccctcagtttttattgattattattttcattatctcagcacaaggaatgcggtaggagagcagggtgataataaggagaaggtcagcaaaaaaacatgtgagcaaaggaatctatgtcataattaagttcaaagggaggtactatgcctggatgtgcacgtaggccagatttatgtttccctccgcccaaacatctgtggagtaaagcataacaaggcagcattgctgccaacatgtctcgcctcccgccatagggtggtttttctcctatctcagaattgaacaaatgtacaatcgggttttataccgagacattcagttcccaggggcaggcaggagacagtgcccttcctctatctcaactgcaaggctttcctcttttactaatccacctcagcacagaccctttacgggtgtcgggctggggcacagcctctcatcccatgaggctatatttcagactatcacatggggagaaccttggacaatacctggctttccagggcagaggtccctgcagcttttcacagtacattgtgcctctggtttattgagactagagaatggcgaagacttttaccaagcatactgcttgtaaacgttttattaacaaggcatgtcctgcacagccctagatcctttaaaccttgattccatacaacacatgtttttgtgagctcaaatttggggcaaagtcacaaattaacagcatctcagccaaccaattgttcaaggtacaggtcaaaatggaatttcttatgtcttccctttctacacagacacagtaacagtctgatctctctttcttttccctacaggattgcaggcatgcagcaccatgcctggctaattttgtatttttagtagagacgggatttctccatgttggccaggctggtctcaaactcctgacctcaggtgatctgcccaccttggcctcccaaaatgctgggattacaggcatgaaccaccgcgcccggccatgctaagtcctttcttggctccattgtgctgtccctcctgcttcctctccaggtccatctgccacagtgctacgtgcaccagcgtgccagcaacagtggctggtctctgccccgtgcctcctccactgggctcacacctgtcttattttgtcctttggtggctctgagaagcagcctctgcccctctccctttcccttactctttgtaagatcctcttccttctgccctaccatgttgcttggacaccagggtggaatagcagagaacggctgcttgtgtttgaattccagctctgccacttcgatagatttctgaactgagacatgtgactctctaggcctatttctgcatgggtcggagagtgggcgggactgctttactgagttatagtgaatgtagttttaacctaagcgcctcacatgactaactcctcatccatcaagaatgagctcagctctcacttccccactcctcacccccctgtaaagtaacctttctccaaggttatgcttcaacaggaatagctaacatttattaaattgtggcacgtaagtatcttggatatattggctcattgaatcctcacacctactattttacagagatgccagtggggcttgagattgaatcacttgcccaggctcccactgctggtaaacagtagagggggctcctgacccatcagtctggcttgacaacccattccctcaactgcggatcccggattcccttatcaccctgttgatttctccatagctgtggtaacatttgttgcatgaatggaccgttgaaatagggcctggcagggagaaattcaggaaatgaatgaatggttcttccctggcagccttgatgacttacaagccctcaaggggaagcattttctcctggactccttgatgccggagctgctggtgtttcccgcccagacagatctgcatgaacacccactgtaccgggccggacacctcattctgcaggacagggtaggcaagaggaatagaaaagggaagaatgtgtaggcacgggaagggcctagcctggggtctctgtttacccggcccctgtgttctgcctgccaggccagctgtctcccagccatgctgctggacccctgccaggctcccatgtcatcgatgcctgtgccgccccaggcaataagaccagtcacttggctgctcttctgaagaaccaagggtgagtgccacaggaggaggaggaggaggacatggggtttgattttgtgcctttcagtgggtaataaaggctgaaaggatgactttcgcttaactctttcctgctgtaccaaagtagttcacggtatttgccccaagctaagctttccccactgcaggtgtgagatgtggatcccttagcccttggggcagagaccccaggccagttacctctgaccctgggccctttaaatataggccgtttcaatattgtgtgtcctggcttaacctgcatgttctggttgtctgtgtcagctgtgacaggcccttagctgctccatgcatgctcagctcacccctgctctgccctctgccctaggaagatctttgcctttgacctggatgccaagcggctggcatccatggccacgctgctggcctgggttggcgtctcctgctgtgagctggctgaggaggacttcctggcggtctcccccttagatccgcgctatcgtgaggtccactatgtcctgctggatccttcctgcagtggctcgggtgagatggtgagaaggcgtggctgagggactcggaggtccacagcagcttagacctggagtcatctgttttggtcttagttctgacactttaatgggcttgggaccctggagcaaaagttctcctctgtgaggcaaggatttcaggagcgaggatttcaggactgaggcagcctgtgaagctgtgtaaccgagacacgcttttccttaggtatgccgagcagacagctggaggatcccggggcagggacacctagcccggtgcgtctgcatgccctggcagggttccagcagcgagccctgtgccacgcgctctctttcccttccctgcagcggctcgtctactccatgtgctccctctgccaggaggagaatgaagacatggtaccagatgcgctgcagcagaacccgggcgccttcaggtacagggcgggcgccagggtcgtggaggggggggatggggtgaactgctctcttacccagcattggggctgtttctcttgcaggctagctcccgccctgcctgcccggccccaccgaggcctgagcacgttcccgggtgccgagcactgcctccgggcttcccccaagaccacgcttagcggtggcttcttcgttgctgtaattgaacgggtcgagatgccgacgtgagtgagtgggggcatgcttgggaggcgcaggatggtactggcacatctaacatctacacttctctagctcagcctcacaggccaaagcatcagcaccagaacgcacacccagcccagccccaaagagaaagaagagacagcaaagagccgcagccggtgcttgcacaccgccttgcacatagcagaggctccaggctgactccttcctggtgggaaaggaagatgcctgtcctctccgtggaggaccctgggccctcaccgcaggcagcagtttgcattttgaaaggttattgggtcccttcctcgggctgtgttcttgctggtgagcaaaagtgttgcctgcagaaataaaatgcagaacgtactctacgatagatcacagttttttattcttaatgtcacaagcaggagaaaaatctcacattcatactaaaaattccaactagactcaacaggaatgaagtctctatttgtaatggaaagtcccagcctcccgctgccgtccagtgtgtgtactgtacacatccacactcactctcactcagggttcccggaccggctgtcctgcctgcggaactgaggtaaacaagctcaggtactgacactaggagggtctaccttacataaggtacaggtagaagcttgattgattgctaggcccaggcccacccagaccctccaatcctaacaggtatttaggcttgaggttcactccctcctcagctgcacacgcagccaggtataacactcgccctcagtcacaacggggagggggcaccggttacatctacatcacattatttataaaataagaattacatttcatataacatggccagaaggagctctagtcccccaggaaagctgccggggacagcatttgagcctcttctttgcacaggcataacttaactatacagctaattcctagttaatagcatttatacttaaccacctcaatgaaccaagcttgaaggaatttaaaaggcaatttagcttaaatacaaaaataaatttttgttaaaaaacgtttaaatatttttttcttttaatttagacacacgcattcatacttctcccaaagaggttgggcgtgacagcaaggcgcttgggcctggggtatgtggtttcagaaggacggaaggaaaggatgggctgcagagggccctgtttgggaaaaataggattttaaaaatatggttcattaatttaggttttctaacatctactttgggtgacgtagcctccagtgaggtcagttaagtgggacagaaaccgcagagggaagaggtctttgcttcccctgggcccattctccctggctgccagcccttgaagtcagaacaccatgggaaaattcaggagtcggcacttgtagccgtcaagtggtgctactttccacattcaattagcgaggccccagaaaacttgaaacaggaagtccggcactaccaacatgccgccactcatacaactcaactcttcctccaaactcgattcaaagagcaatacacagagcgtcagacaaaggaacacaggacaaggcttgaaacatacaatcctggagaggcagacgagggcccaatggggccaaagggtagctgggcgaggaggcagctgaagcagcggtgggcatcctgcctgctccaagagcttctcccttcacccctggctctgccaggctaacagtcttgagccaccaagctctgaggggccaaactggcagagggttggagatgaaacattgattcaggcttggcaggaagaaaacggcaggagcagcacccactggggtctccaaggcaaagctagattcaagggcatttaaaaaggagggaatcctgcaaggaaccggtgagggacacagcagcaagaaatggggaaacagagtccccagaagggaccagaggaagagaaccacttctcacagctaagccaagcaagataaagctttacggatagcccatttcccaaatcccatcaggtgcacaccaccgatccaggcgggctggaccctgccccctccagcgacgacggctctcggggaaaggtggaaggggcgcctgcctaagggtgcgctaagcgggagtcagggcagcggacactatgtacaggtgtttccttagttctccagcctccccagtggaactgttcaagtagaggtcccgggctttggccctccgcatcctgcttccccttccctgaggcttgtgcttcctccagaagggaaagggccccagggctgccactgccccctggcggctgaagccagagatccggggtaggtttgctttacgcagctggaagggtccaaggctctttctagcacgtgccaaggtccagatttagggaaggggtggggggaacagggacaggggacaaaggctactttttgcgggtgtgctgccttcgggcctgcagtcgctgtcgagcccctggggtcttggatcccgcaccaatggaaaatgaaggggccgctgatcctggaaagattcaacaagacctcatcagggcagctgctacctgagactctggctctgggtgcccaaatctctggaaggccaggccagtaataaaacacagggtgcctcaatagggctttccccgctgcgtcagaaacactggacgggaggagcctcctgaaatgcaaactcccagagtctcagagcgaggcccacgaatccatttttacctggcttcccatgggaggcaaacttccaccccggacagctcctctctgatctctgccatccaactcccatccctgggctgtgctgtactcctaacccgaaatgtctttcctgtgctgaacctgatcttcacggggcctcagagggccaggagcctgccaccccacccaacctctcctcagacagacgagcagggccacagggtggcttgctgcttaccgaacggtccaacaccaacaaagccttgggcgggtgctgaagatgccccaaaggagaggctgctgcccgatgtgcccactccaggcgcaggggtgttctgaccaaaggtgggggtggcggtgcctggaatgaagagaacagagagctggccagtgagcagagggcggaggcaggcgaggagccgggcaggagcctgtgctctgcagggcacttcccacgggaccctcagccccagttctgcttctggggcactcctccatcagcagctgagccagacaaccgagtcttcatgcctggtgccccagctcagcctgcttctcccacccgctaatggccacgccagggcagagaaaaagcccccctgccccgcagccacctcgtgggcctcctgaccatcgctgcagaggggagtactctggggcccccgcctcctagcgtacctgggttggctacctcctctgttcaggccttttccccctagccaccgtcccctcccctctgaagcctggtttgtccgtcctgtgtcttttgtgatgccccgtggtcccctcccttccccggccttgccctgactggctctggctgcctgcccgatgccctctctggcagcccctctgcagggatggctgctctcagggcttggcctccggcccggacaaggggaagctccctgtgctcccacgctgcttccacacagtttctcttccttccctaaataccgtaactcaggttcaaatcactttaatctgccatgtcctcatgtcacctgtcaactgccaggtcactccctgattcacagaggacccttggctcactggcttcctccccatcaccactcacggtgacttcgccctgtggggctgactgatggtcctctcagcccctcggccctgccacccccatgacctcctctccccgacccctgccaccactcctgcagccacactgtcaccacaactgctccggctcccgaatctcctgcaggcaccacccctcctgcagctgacttcacccgctctccactcctgcaccccctgagctgcatcggggcactgacccgctgcccctcctgctgtgcttgctggggtctccacagccgggtggcaccagctgtccgctgaccttagatctatacccagtgtcgctgggaaacacacgccatgctaactggcctcactttaacttcacaatcacagttttccagcccacaaactgcctggaaactgatcacactttttaatatgatgttcctttcccccactgtccaaaatgactatttcaaaagaccccttttttatacactttatcccgaccttccctctcccagattttctctcctacttcacgaagcaaacagaagccatgggatctacattcatcttccacacgggaggaaccatcactgcatccttctgcctgattctgcaatggttttcctgaacacttaagacccaaacacccaaccctggccacaaacaatcctcgcctcttggcctccttccacaccactgctttagctcctgccctcctgccatgcttgtctttgttctgctcttcaacataccaaacatgtttctgcctctgggcctttgcatgcgccatcctgggcctgaaaggcatgtccacttgtgctgtgcccacccccaccccacccccatattcagcttacgcttgagacagtcttgctctgtcacctaggccagagtacagtgtggcatgatcttcgctcactgccacctccacctcctgggttgaaacattcttctgcctcagcctcccgagcagctgggattacaggtgggtaccaccatgcccggctaattttttggtatttttagtagagacagggtttcgccaagttgcccaggctggtcttgaactcctgtcctcaagtgatccaccctccttggcctcccaaaatattgggattacaagcatgagccactgcgcccaaccttcagcttacaattgttaagtactcagaaggcctttgaccagttaaatccacaatggctcctccagtcattactacgttagcaaaacatgtatcatgccctggcatctcactgagttctatattcagtgcctgtctcttcactgccacagcataagctccccgagaccacaggcttcacaggcacagcttttcagtgtccggcccggtagcccaagtccacgcccctccttacctccaaacacaggtttgctctcagttgtgctgcccacgttgaaggcaaacggtgtgctctggccggtggtgcccagggcgttctgacctaagccccctgcgaagggggtggaggtggctgtgctcccactctgtcctgctccaaagctgaaagctccggtggtggcgctggagcctggggtggccacgttgatcccaaagctcccactgccagcgggggctgccgaacccccaaacgtgaagggtgatggtgttgtgctgccaaacaccgagctgctgctcccgctgctggcggtctgggtggtggctccaaagccggagctggtggctgcaccgaaggagaagacagcagtggagccgccaaaggcgggctgtgagctggcgggagcgccgaaggccgaagccgtggctttcaacccaaacgccgagtgcgtggcaccgccaaaggtaggctggatgggcgtaggcacgtgcgcaggcacgatcttgatcgtggacgcaggtgcaggtgtgggtgcagtagccggggccggggctgcagagtttccaaaagtgaaagagctgccaaagctgggggtaagggctggcttggcggcccccggtggctgcccctcagcggccccaaatgcgggctgggggttggctcccggatatgatgggagcggggacttggcgcttgagccaaagggaatgttgaacgtgggggtgctcgtgttactgaacgtcagagtgggctggctgctggtggccggggcggaggtggcgagggtgctgccaaaaccactaaagtcggcagcgctgctgctggtggccgttggcacggcagtgggcagggactggctgaaggtggtgactgtggtggttgtgggcaaggcaggaggtttgccaaactggaatatggagcccatggccggggtgaagctggcagcagaggcctggggcgccccgaagaggaaaggctgtgaggcggcagtggcggtgctggtcgtggtactcacactgctgctgctcacactgtttatgccaaagccaaacgcaggcttcgaagcagagtctgtggatggactggcagaggtgatgggagccacagcagaggtggcgctggccaggccagtgaagagcggggcagttgtggtgggagcagtggcgggagtagttgtctgcttgaagaagggagcaggcaagggcacagatgcaggtggccccatgctgctaaagacaggctggaaggtcggggctgtggtgctggtggtcgtggggagggaggagctggagggtgctgtggctgagactgaagggccaggcggtgtgaggccttccttctcactcttgggtggagccgtgaaaatgggcttgaacatgggagatgctgaagatgcagcaggggcggcagggctggaaggtgaggtgttctgtgttccaaacaggaagctttgcttgggggcgggggacggggcagatgtggcttggggtttggtagccgtctctgcttgaagggttggaggtgccttggtgtcagtggctggtaccatggatggagcagggatcagccccagcaaagtggtcgggggtttggagtcaaaggaggggctggggagcagccctggcggccctgactgtgataaacccagcgggggtaggaggctgggtgtctttggaggtgagagggcctcagtggttgctgctccagcagattctggaagaagaatagaaaatgtgaaattggaataaacacttcaaagatgatggtattcagtatttcagcgtcctccccatgcctaccacagagcctgggatccaagagtcagtcaataaactcagctaagtctacactacaggcctgtacagtaaatcaaggaagtgttcattatttccacctcacagatcatcagacagaaggggataaaatggggcctaaatgggggcctaatgtgtagagactaagacagtccaattgtctgaactctgaagttcacgtatgaatctagatatactttatttgcctactaagctcacctgccaggcgctaagagcacacaactatgaatggggaagtctctgcccttgagcagggagggtgcgtacgaaccccaggttaccgtctgataaagaggtgtgcgcgcgcagtgccgtgaaggcctgggccgggaacaccagcagccctcaaagtgctggagggaaaggaagcagtgttgttctggaccagtagttctgacaggcaaggatatcctgaccacgccaccacattcacacttcagaggtgctgcaccgggaagatcattctcatctgacagatgaggaaggcgaggctcagggcagctaagccaggcttcagatcctgagcgtcgcagcaccccttctctaacacttcctgatgtgggctccggcgctgttaaacgtaggcccgctccggtgtgctgagccagggtgcgttcggcctgcagagcaatctccagcgactgacaggcacgacgcccttattccaacccaagccggggatgctgctcagaaggctggatccacggccccactccagctcacctgggcagggtggcaggctcgggggagtctgcatcttcttcaagctctctaacagtgggttggtgcttggggccaggagggaggtgggtggggaggcagttgcagcagcaggcagggtaaaggtaaatgaaggctgagtggtagttggggtctcagtgacagagttcgaggcagcatctaagaaagaaagaaaggtgaagcagtcctggcttgtctgggacttctttccacatgcctgtcggagagcaggctctcagcacagctcatggaggaatgtctgccctaaattgcagtggtccctgctgtccagttcccgtgaagaccaacacggatatctcaggtgagaaagaccacaagaaaacatggaactctacttcggattttcccagagaaacccatttttccaaacaccaaaataaaaccaaagaaaacagacacctgaaacctctcgagagtgcaacgatctgtgctccttaccactcttgtcctccaaggcctggttgaaccactgtaatgaagccttcttctctaagtctaggtcctcggcagtgatcgaatagccaagctggggaggtggaggctaccaaagagaaaaagaagaagtcaggccaatcagaaaaaacgggaaggctgggcgtggtggctaacgccggtaatctcagcactctgggaggccaagccagctggatcacttgaggtcaggagtttgaggctggcctggccaacatggtgaaaccccatctctactaaaaatacaaaaaattagtcaggcgtggtagcaagcgcctgtaatcccagctacttgggaggctgaggcaggagaattgcttgaactcaggaggcagaggttacggttagccaaaatcgagccactgaactccagcctgggtgacagagggatgttgtctcaaaaaacaaaaacaaaaataagttagaaaaaaaaccagaagaaacttgtccttagcgttcctaagacttaggagagctaagccggggagggcaggagtagatggacaagaccataccaaggtcagctgttcccctcgccgagaaggcagcagctgaactttccgcttacgctgcccagagctgccaggtgtagactgagaattcgagttttgtttcttccttggggttgtatctgcagctaaagaaagaaatcaagactcgtttgcttccttccctcttccagaaatggatggttgtgtctacccacttcgcatttcacactgagttttcaatgatggtatctctgaaaagattcaatcttctatggtttggttgcttggatggtgtttgtaagattaaggcgcgcacacaaaccgcttactgtgcagtaattactgggatcacccacaggtgactcaaactgagcttacctctatccaatcgttagcccccatctgtagcctttctccctcatcagactataaacttctgaaggagaggaaatctctctctttgtatctaacatgccttagacatagcaatgctcaagaccttttttcaataggtattaatctctacatcctccacaaatacctccaccaccaacagcagcccctcctcctggctcagcaacctacccttttctccctgggactccttgtctgctgccaatggagttgaagaactggaatgatgacacagctcttcttctctgttgggaaaaaaggaacaatttagtctagaaagacttcttggctgaagtattaaataatttctcacaccctcctaactaccaagtggccaacatctaaaacaaccatcatttaagatctcagtatgccaggataaaaaaagtcaacaggaaattccaacagaatgaagggaggctgttcacagaggccatgaagacagtttttgtcttaaaacaagcacaaacaataatcttcaaaccttacttacaacctaccaagtccctgggagttctagacacagatgtgatccctgagggagtggcattccagccaactgcaagcacctaggggatcagctcgagtcaagaacctgaaggcgactgcccgctgacttgactctctctgctctccactctgcatggcctctgtgcttgcacccgatccctcatgctggagtgggaggcgacagccagaggccactggagtcagtatccaagactgtagggatgatagttgttcaggtgggtgctgcattgtccctctcagggacttagtttctttgattctccaagtcacagcagcacaaagcctaagagccaggttcgtttcccacctttcctcacccccttctgtccacgtagcaaatgaaaactgcaggagaatgccgaataccttattttctttgctggcctctccggtgtctgggagcgggatgaggctgggctagagaagggtgatgaactggggccatttctcttccagagctaaaaatcaagagggacatgactgagcctgctgataacttagcatctgaccctcaacatgacaaagtctctttttaagtgactaaaaaaatattttttatggttaaatggttagtcatgcctgtaatcccagcatgctgggaggccaaggtgggaggattgcttgagcccaggagtttgagaccagcctgggtaacatagcgagacccccgtctctacaaaaaattgaaaaatcagttgggtgtggtggtttgcatctgtggtcccaactactcaggaggctgcagtgagctgagattgccccactgcactccagcctgggtgacagagtgagaccctgtctcaaaaaaaaaaaaaaaaaaaaaaaaaatagaaaatgaaaatgaaaaaaatttgtttgtgaagaaagacccctgaaaagaaagtcaactgccagtattaattatgaaagcaaaaaaagaaaagtctataaaagtaatggaatgtgaataaaggtagaagggatggacacacttttgcatatattagcctcagtaatgaagagccaggacacattcaaacctgtgccagactgtctacggaaaggatacaagtaaattaaagaagacaacccagtaaactaatttagtcttgcttccattaaattttcgatttttcatttagtaacttcattttaaaaatacgctgtcatggccaggcgtggtggctcacgcctgtaatcccagcactttgggaggccaaggggggtggatcacgaggtcaggagatggagaccatcttggctaacacagtgaaatcccatctctactaaaaatacaaaaaaatacaaaaaattagctgggcgtggtggcgggtgcttgtagtcccagctactcgggaggctgaggcaggagaatggcgtaaacctggggggcggagcttgaagtgagccaagatcgtgccactgcactccagcctgggtgacagagtgagactctgtctcaaaaagaaacaaaaaacaaaaacaaaaacaaaaaaagcactgtcataatatttatgacttttgcaacaacgatggcatttatcatcatgtgatgattatccatacatctgcctcttccaccaggtgagttcttgacagcaaagatggtgttttcatctctgcttcctccacagaccagcagcaaagtagatggcacagagcggacactgcaaatagtctcgtaagtgctgagcctaattacaaagccactaaactgtcacctcagaccgtctttcctacttgaaaagctgctagtgatttcttacccagtaccagctacatcatataagtataaacaggaagccaacaagcttaataagtacaaacaggaagccaagcttaataagagttcaaaaagggaaaagaggaagcttcagacaagtgg

SEQ ID NO: 2146 - protein, 1079 aa, Homo sapiens [sequence omitted]

SEQ ID NO: 2147 - DNA, 1090 bp, Homo sapiens
  source (1)..(1090)
  CDS (201)..(890)
ttcggttcttctggggtgttgatgctcctaaagcccgagagcacgtgtccagaccctagcctgtacgacgctgactctgcccggtcccagaaccaaagccatgccggggtgtggcctctgaccccacgcggaggggacctcgccttgcgggaccccacctggaacccgacctcccagcctcgcagccggcctgagccgccatgcgcgggaagttgctgccgctggccggcctctacctggtgcagggcctgccctacgggctccagtccggcctcctgccagtgctgctgcgtgccggcggcctctcgctgacgcgcgtggggctggccaaggttctgtacgctccgtggctgctcaagctggcttgggccccgctggtggacgcgcagggctcggcgagggcctgggtgacgcgcagcacggcgggcctgggcctggtgtgtgggctgcttgccgggctgccccctcctggagctggccaggccgggctgcccgccgctgtggcggggttgctgctgttgttgaacctgggtgccgccatgcaggatgtggccctggacgcgctggctgtgcagctgctggagccggccgaactggggccgggcaataccgtgcaggtggtcgcgtacaagctgggggccgcgctagctgggggcgcgctgctggcgctgctgcccaccttctcgtggccgcaactctttctgctcctggctgccacctactggctggccgcggccctggcctgggctgcaccagccctgcggcggctcccacagcagcccccttccgagcagcgtccccacaccgcgcaccttctgcgggacgtgctagccgtgccggggaccgtgtggacggcaggctttgtgctcacctacaagctgggtgagtgaggcctcgagccaggcaacagcagttggggcttccgggacagctccaggtgtgtccccaggggcttgcaacccattacagggccacgctctttctggggtatgacctgcaagacttggccctgacatccggggctctgcagctgggccttgtgtcttgtccgcccccagctctagccccatccctgagcgctctctcgggc

SEQ ID NO: 2148 - protein, 229 aa, Homo sapiens
MRGKLLPLAGLYLVQGLPYGLQSGLLPVLLRAGGLSLTRVGLAKVLYAPWLLKLAWAPLVDAQGSARAWVTRSTAGLGLVCGLLAGLPPPGAGQAGLPAAVAGLLLLLNLGAAMQDVALDALAVQLLEPAELGPGNTVQVVAYKLGAALAGGALLALLPTFSWPQLFLLLAATYWLAAALAWAAPALRRLPQQPPSEQRPHTAHLLRDVLAVPGTVWTAGFVLTYKLGE

SEQ ID NO: 2149 - DNA, 1294 bp, Homo sapiens
  source (1)..(1294)
  CDS (201)..(1094)
aataagcgtctagatgatgtaaacaatgaaaatatttacagtcaattcacattaaaaaatatttctgatagttttgctgttcacgattcttcggtatgtcattatgtatcaccaattaaaaaaattaataatgatcaagtagatttacttggtgagcgttggatgattttaattgactactctttaacgaaacaaaaaatatgataaataaccttatattttctttattgcctattctcttatctttaatacttggatggggaattgggcgagtaataaattcaaatactagagataatttagtaagttatataacattcttagtctggttacttctaatttcaataggtttccaatttggtagtattctttttgataaagaactaggaactacagtaattgtcggatcatttatttattcaacaattattacttttattacttttattttactttttaaaaaagtaaaaaatacaagtaaaaataagaaatctatatctgaaatttttaaacctatcaaagagtgtgtgattgctatatcaatggttattattggtatggttttgtatcttgtattgccgagtaattgggagagtgaggctgtaagtagtattcttctttatatcttgatatttttggtaggtgtggatttatcaacaattaaaattcaagctttgaccattaatcattttcaagtaccactaattacaattttttcactattcattgctgcatatttaacaacattcattatagataaatcattttttgaacttttagttttaggaagcggatttggctggttttctctttcaggtccactcataggaaaaacattaggtgctgaatatggaacttttgccttattaactgatttaattagagagttttatgcaataggtttgctatatcttcttggacgaaattatcctaatcctataattggtatttgtggagctacagcaatggattctacacttccatttataaaaaataattgttcgcaattggacgtgcaaatagcaatttttagcggttttattttgacaatactagcacccttttttattatattttttagtgtttttatttaaaatattattttaggcagtgatttacttaacttgattattaaatttttctaaaatcaacataatacacgttatacgaaatgtgttatatttcttgtgaaatttcaacgctatagtttcaattttatagcccgagcatcccagttcgggcttttttatgctttttcacgttccacggctaatctttgatcaatattccacgt

SEQ ID NO: 2150 - protein, 297 aa, Homo sapiens
MINNLIFSLLPILLSLILGWGIGRVINSNTRDNLVSYITFLVWLLLISIGFQFGSILFDKELGTTVIVGSFIYSTIITFITFILLFKKVKNTSKNKKSISEIFKPIKECVIAISMVIIGMVLYLVLPSNWESEAVSSILLYILIFLVGVDLSTIKIQALTINHFQVPLITIFSLFIAAYLTTFIIDKSFFELLVLGSGFGWFSLSGPLIGKTLGAEYGTFALLTDLIREFYAIGLLYLLGRNYPNPIIGICGATAMDSTLPFIKNNCSQLDVQIAIFSGFILTILAPFFIIFFSVFI

SEQ ID NO: 2151 - DNA, 2047 bp, Homo sapiens
  source (1)..(2047)
  CDS (201)..(1847)
  modified_base (239)..(338): a, t, c, g, unknown or other
ccgcatgagccctgagcctgcatgtcagggaggagttgtctgtgagactcctcagggtggctccggggaggtctgggccttcgtttccctctgcagactgcgggggatgatggcgacctgggccagcccttccagttagggccctgcggcttgcctatggagaaaaggggaggtctccctcccaggccgcttggtgggtgatgtctcaaacaggcgggaagacagagagagagacagannnnnnnnnnnnnnnnnnnnnnnnnnnnnnnnnnnnnnnnnnnnnnnnnnnnnnnnnnnnnnnnnnnnnnnnnnnnnnnnnnnnnnnnnnnnnnnnnnnnggacgcgtgtcacatgtgcacatgcctgtgtgtaggatgcgtgtgtacgtgtgtgctggggatgcgtgtcacgtgtgcacatgcctgtgtgggggatgtgtgtgcacgtgtgtgcctggggacgcgtgtcacgtgtgcacatgcctgtgtgtgtggggatgtgtgtgcacgtgtgtgcctggggacgcatgtcacgtgtgcacatgcctgtgtgtggggggatgcgtgtgcacctgtgtgcctggggacccatgtcacgtgtgcacatgcctgtgtgtggggggatgcgtgtgcacctgtgtgcctggggacccgtgtcacgtgtgcacatgcctgtgtgtggggggatgcgtgtgcacctgtatgcctggggacccgtgtcacgtgtgcacatgcctgtgtggggggggatgcgtgtgcacctgtgtgcctggggacgcatgtcacgtgtgcacatgcctgtgtgtgtggggatgcgtgtgcacctgtgtgcctggggacccgtgtgacgtgtgcacatgcctgtgtgtggggggatgcgtgtgcacctgtgtgcctggggacgcgtgtcacgtgtgcacatgcctgtgtgggggatgcgtgtgcacctatgtgcctagggacgcatgtcacgtgtgcacatacctgtgtgggggggatgcgtgtgcacgtgtgtgcctggggacgcgtgtcacgtgtgcacatgcctgtgtgtgtggggatgcgtgtgcacctgtgtgcctggggacccgtgtcacgtgtgcacatgcctgtgtgtgtggggatgcgtgtgcacctgtgtgcctggggacccgtgtgacgtgtgcacatgcctgtgtgtggggggatgcatgtgcacctgtgtgcctggggacccgtgtgacgtgtgcacatgcctgtgtgtgtgggatgcgtgtgcacctgtgtgcctgggacccagaggtgaaatcacaaccacctgaggtccccagcaccacctgcccccgagctccagcccaggcaccttgccttgctttcatcccagaaaggggtgactgcaggccggggctgccctggtgcaaggatttcatcctagtacccatggccatcaggggaggcagctggggccagaaatgggcacccagggaccaggaggagccctctgcgctatgccttcagccctgcctaaagggcatccccagggaggcaggcttctctgtccaagccccagccagagcacagcacagactgttctggtccaatccagccccccacccccacaatttgagggcaaagaatgaaggcctcctgacgggggctgggcatttgccacgaagcctcattaacttggacactgtcctcattccacagggcagcacagcccctcaatgttggaaaacggtggcagagcctcagatacctgccgggagttggaggactgggatctgtcccatcccgtggctctgggctcacacagggtcccagccacagccctggcagcctgggcttgattccatcttcttccaatgagaagaatgtgttccttcctgctgacctgcgggattggaaatgcaagtgaaatcgctgttccgacgcacaggttgtccacattattaataatagatggccagtgggtgaattattttcagtgggggattattttcagtgggggaattatttcaaccatcccacccaacgtgcaacctcgggccagaactggtccaggaatg

SEQ ID NO: 2152 - protein, 548 aa, Homo sapiens
  MOD_RES (13)..(46): Variable amino acid
MSQTGGKTERETXXXXXXXXXXXXXXXXXXXXXXXXXXXXXXXXXXGRVSHVHMPVCRMRVYVCAGDACHVCTCLCGGCVCTCVPGDACHVCTCLCVWGCVCTCVPGDACHVCTCLCVGGCVCTCVPGDPCHVCTCLCVGGCVCTCVPGDPCHVCTCLCVGGCVCTCMPGDPCHVCTCLCGGGCVCTCVPGDACHVCTCLCVWGCVCTCVPGDPCDVCTCLCVGGCVCTCVPGDACHVCTCLCGGCVCTYVPRDACHVCTYLCGGDACARVCLGTRVTCAHACVCGDACAPVCLGTRVTCAHACVCGDACAPVCLGTRVTCAHACVWGDACAPVCLGTRVTCAHACVCGMRVHLCAWDPEVKSQPPEVPSTTCPRAPAQAPCLAFIPERGDCRPGLPWCKDFILVPMAIRGGSWGQKWAPRDQEEPSALCLQPCLKGIPREAGFSVQAPARAQHRLFWSNPAPHPHNLRAKNEGLLTGAGHLPRSLINLDTVLIPQGSTAPQCWKTVAEPQIPAGSWRTGICPIPWLWAHTGSQPQPWQPGLDSIFFQ

SEQ ID NO: 2153 - DNA, 1588 bp, Homo sapiens
  source (1)..(1588)
  CDS (201)..(1388)
actaaaaatacaaaaacattggccgggtgtggtggcaggcacctgtagtcccagctactcaggaggccgaggcaggaaaatggcgtgaacccaggaggcagagcttccagtgagtcgagaccgtgccactgcactccaacctgggcgacagagcgagagtccgtctaaaaaaaattaaattaaattaaaattttttaaaaatgaagaaacaaccagagaatggaagcaagtatttgcaaactatgcatcagacaacggattcatccacaaaatatataaagaattcaaactactcaaaagaaaaaatacaaacgatcttattaaaaaaatctacccaaaacctttgtcccccaccattatttccctacaccttcttttcccgaccacctttgaccccctccctctggccaccctttttcttcctccatctgcccccaaacttcttcaccatttttctccaccatcatttcacaaagccttctctactctcctgctcaacacccttttccccatccaccgacccaaaccctttccccactgtttcttcccaccgtcttttcctcttatccctggccaccctctttttacccctcccgcatcacactcttttgctccttcatctaagcaaaaacattttcccccgccttttcccaaaaccttctccccactcctgctgctcaccaccgtcttttcccccttcatccacccaaaaactgtgttcttcatcgtctttccccccgttcctccttgccatttctctttcccttctccatctacccaaaaacatttcccccatcttttcacaaagccttctccccactgctgctcatcttcctctttcccccctccatccaccccccaaaactttccccaccatcttttcaaagtctcccccctttaccactcgtgctcttctttccccaatcctgcttgccatcctcttttttgtcctgtatctaccccaaactattttcccgtcgttttcccaaccctctaatccctgctccctctccccaccctctttcctcctcctcgtcactctctcccccctccatctatcgaaacactttttacccaccggctttctgcaaaaccttccctccctcccgctccccaccctgtttttccgcctccatgtacccaaaaacttttttccccaccatcttttcgccgccatctttttgcaaccccttctcctgctaagctatcctttttttccctttggcattaactaccctctttacccccctacaactatcccaaaactgttttccttcttctacctctccagccgcgccatctccatcgctgccaacaaccgcagcgacgcaagccacgctcccgcgtctccagcctccagcatatggccagtgactcccgattcctagtcctctacgccgggatgcgaccacctcgacacgtcagtacgggaacctgaaaagaccagatttcttttcagcatcatttatatactgccgttatgcccacggaggatcctggactgcatgtattgattggatgagaaaaaaacctccaggcttactctgattggacttcatgatcatgttctgattggatgagagcaagt

SEQ ID NO: 2154 - protein, 395 aa, Homo sapiens [sequence omitted]

SEQ ID NO: 2155 - DNA, 1459 bp, Homo sapiens
  source (1)..(1459)
  CDS (201)..(1259)
  modified_base (1139)..(1238): a, t, c, g, unknown or other
gattcatgctctcacccttctgcatacaaaattttcatgatacgatcttactactgtaacagtttatttgtctatcgtcccgtgttttgggcgattgagtccttgctctcttcactcaggtctgctcagttgcatcgggttcgcgtatctcgagctcatctgtctagtctctccgtctattctcatgggtctcctctgcgatgtacctgctccctgcctctcctagcctcttcctccggtgctcgccgtgggttctcccctcgacctcgtgctttccttcctttctgtctctgcttctctcggttgttcgccttctggcagtcctcgtcttatgttctttttgtgttctttcgctccctgctcatctgtcgcccttgccctcgagtcttccactcgcactcctatcctccttccgtcgctccctctctactcttcctgctctcttctcttccttctctctctccttctctccttttcttcctttctttccccttgctcctgcctctgtttctcttatctctctcgcttacgctctccccagcggacgctgtttgccctctccttgcttcgtctctttcgctttctacctcctctctctgtctctctctcgcgcctctctgctttctaccctgtccgttcatccgctctccctgtttgtgccccgtaatctcttgtctcttcccttctctttgttgttcgttcgtcattctctcgttcttcccgttctctcgctcctccctctcttctcttcctgctctccctctccgccctctctgtcatggtcttctcctactttctcttcgtgttcctctctgcctcctttgcctccttgctttgcgctccatcccgtcgtcgctcgcctcgttctctccttctgtcttgcttcctgtctttctccgtcttctcctctctcgcctttctcgtcctcttttccctctttctgtcctcccttctccttgctctttcttccttttcctctttcctcgttcgctttctgtctcctccttcctgtcttttctcttcttttctctcccgtgtgtcccctgttctctgctctccggcttctcggcggctcgcgttgttttctctacgtctgccctcctgtctctgttgtccgtcctggcgctccggttcccttnnnnnnnnnnnnnnnnnnnnnnnnnnnnnnnnnnnnnnnnnnnnnnnnnnnnnnnnnnnnnnnnnnnnnnnnnnnnnnnnnnnnnnnnnnnnnnnnnnnntgtggtgcctcatgctcgtaatcccagcactttgggagattgaggcgggtggatcacctgaggtcaggagttcgagaccagcccagccaacatggtgaaacccagtctctattaaaaatacaaaaattagccaggcttggtggcatacacctgtagtctcagctactcaggaggctgaggcaggagaatttcttgaacccgggaggtggaggttgcagtga

SEQ ID NO: 2156 - protein, 352 aa, Homo sapiens
  MOD_RES (313)..(346): Variable amino acid
MYLLPASPSLFLRCSPWVLPSTSCFPSFLSLLLSVVRLLAVLVLCSFCVLSLPAHLSPLPSSLPLALLSSFRRSLSTLPALFSSFSLSFSPFLPFFPLAPASVSLISLAYALPSGRCLPSPCFVSFAFYLLSLSLSRASLLSTLSVHPLSLFVPRNLLSLPFSLLFVRHSLVLPVLSLLPLFSSCSPSPPSLSWSSPTFSSCSSLPPLPPCFALHPVVARLVLSFCLASCLSPSSPLSPFSSSFPSFCPPFSLLFLPFPLSSFAFCLLLPVFSLLFSPVCPLFSALRLLGGSRCFLYVCPPVSVVRPGAPVPXXXXXXXXXXXXXXXXXXXXXXXXXXXXXXXXXXCGASCS

SEQ ID NO: 2157 - DNA, 1069 bp, Homo sapiens
  source (1)..(1069)
  CDS (201)..(869)
attataattaatttactattccctcattttttgatatttagtacttttaaaataatgtttaattacaaattgtaatttaaaaacaaatattaatttcatttaatatgcatttcttcatttgaatttacagaactgggtttataggcccaaaaggtcaacgaattttcctcattctcagaggagtccttggttctaccgccatgatgcttatatactatgcttaccagacaatgtccctcgctgatgccacagttatcacgtttagcagtccagtgtttacgtccatatttgcttggatatgtctcaaggaaaaatatagcccttgggatgctcttttcaccgtgttcacaatcactggagtgatccttatcgtgagaccaccatttttgtttggttccgacacttcggggatggaagaaagctattcaggccaccttaagggaacattcgcagcaattggaagtgccgtatttgctgcatcgactctagttatcctaagaaaaatgggaaaatctgtggactactttctgagcatttggtattatgtagtacttggcctcgttgaaagtgtcatcatcctctctgtattaggagagtggagtctgccttactgtgggttggacaggctatttctcatattcattgggctctttggtttggggggtcagatatttatcacaaaagcacttcaaatagaaaaagcagggccagtagcaataatgaagacaatggatgtggtctttgcttttatctttcagattattttctttaataatgtgccaacgtggtggacagtgggtggtgctctctgcgtagtagccagtaatgttggagcggccattcgtaaatggtaccaaagttccaaatgaagcatcattgctgaaatacatatttttttcaagtacaccatcacctaattcacatacagcatacgcacacatctggaaaatctgcattttcttcattggttgtatttaataaattgcctaaagtaccatttttgaatatagtatgtctttagttaagaatagctagtctgtttggtgtaacaattttttggtagctttgg

SEQ ID NO: 2158 - protein, 222 aa, Homo sapiens [sequence omitted]

SEQ ID NO: 2159 - DNA, 1369 bp, Homo sapiens
  source (1)..(1369)
  CDS (201)..(1169)
  modified_base (958)..(1057): a, t, c, g, unknown or other
gtcagatgtgaggcatagcatgaatgaaaggtaaatagcatgagtattagaaagtagatgaggaagtttaataattttaatgtgcttcataagctctcatggactttcacgtatcaattagtaaaagacgtaactaagtgatctggctttcagtctcctagttctctacagtgtaccctcagttttccacgtgcttacacatgcctacatttgtactgagagaaaaggaaatagttttttttttttttttgagacagtcttgctctgttgcccaggctggcgtgcgctcggccggcctcgtcctcgctctgtctctctctccctctgtctgttctcccgcgggctctctcctctgctcctcctttctcctccggttctgcgctcctctcccgctctgctgtctctccgtcggtgcttttctgtgtcttccttgtcgtctctgctctcctcgtcccttctcctgttgcttctctcctctctactgttctgtcgctctgtccgctcctcctcgtcctccccgctgtgcctgtctcggcgtcgttttccgctctcgtgccttccctgcgctctctctctgtcggctcctcgtcctcctctcggtcgcttctgtcgctctccgtctcctctttcctctcgtctctttcgctgctgcgttatgcgtctttggcctcttctctgtgtcctgctgtgtttcgggtgtctcctctgctgctccgtgtcggtctgttgtctcattcatgcgtcggctgtcttcgcggtcgctccgctcgttcgtctcgccgcctcctctcctccgtcggcggtccttctgtgttgccgccgtctcgcggtcctgtgcccgttgcggtgcgctgccctcgtctcgcctctgctccctcgccctctctctgtccctgcccgctggctctctctcccctccgcgctgtcttccggttgtcgtctgctgtgtcttctcgtnnnnnnnnnnnnnnnnnnnnnnnnnnnnnnnnnnnnnnnnnnnnnnnnnnnnnnnnnnnnnnnnnnnnnnnnnnnnnnnnnnnnnnnnnnnnnnnnnnnnccatggcgcggtccttccgccccgtggggaagacctgaggaaggcagcggggagacccaggctgcagcaacaaagggcagcgagcgattggccgggctgcaggcgaggttagccggggacccgggtggccggaggcagcggcgagcggtgcacgtgcttgcagacacgggcgagtgtggagccggggggtgcacgcccggtgggtaggggcttgctcccccgaggcatgggatggcgaggaggctgcagcgacatcgttctgcctgcacccggcctggggctggcagggtaggggtgtgttggggggggaag

SEQ ID NO: 2160 - protein, 322 aa, Homo sapiens
  MOD_RES (253)..(286): Variable amino acid
MPTFVLREKEIVFFFFLRQSCSVAQAGVRSAGLVLALSLSPSVCSPAGSLLCSSFLLRFCAPLPLCCLSVGAFLCLPCRLCSPRPFSCCFSPLYCSVALSAPPRPPRCACLGVVFRSRAFPALSLCRLLVLLSVASVALRLLFPLVSFAAALCVFGLFSVSCCVSGVSSAAPCRSVVSFMRRLSSRSLRSFVSPPPLLRRRSFCVAAVSRSCARCGALPSSRLCSLALSLSLPAGSLSPPRCLPVVVCCVFSXXXXXXXXXXXXXXXXXXXXXXXXXXXXXXXXXXHGAVLPPRGEDLRKAAGRPRLQQQRAASDWPGCRRG

SEQ ID NO: 2161 - DNA, 1627 bp, Homo sapiens
  source (1)..(1627)
  CDS (201)..(1427)
  modified_base (1150)..(1249): a, t, c, g, unknown or other
gattctcctctctcagcctcccgagtagctgggattacaggcacctgccatcatgcccggctaatttttgtattttagtagagacagggtttcaccatgttggccaggctgatcttgaactcctgacctcaagtgatccgcccacctaggcctcccaaagtgctaggattacaagcgtgagccactgcacccagtatttcatgttccatttcatatttatttcatcatttcatctccttcatttcatttcaaaacggagtctcactctatcacccaggctggagtgcatcaccacagccagcatttcattattcatttcatttcattatttcttcatttcatttcatttcacccggcatttcattattcattatttcatttcttcatttcatttcatcccatttgagacagagactcgctctatcacccaggctggagtgtgccactgcacctggcatttcattattcatttcattatttcatttcatcatttcatttatttcattttttcatttcatttcatttcacccggcatttcattattcatttcattatttcatttcatcatttcatttcatttcatttcgagacggagactccctctattgcccaggctggagtgcgccactgcacccagaatttcattattcatttcattatttcatttcatcatttcatttgatcatttcatttcatttcaagacagagactcgctctatcacccaggctggactgcgccaccacacctggcatttcattattcatttcacccagcatttcatatttcatctcatcatttctcatttcatttatttcatttcatttcaagacggagacgcgctctattgcccaggctggagtgtgccaccacacctggcatttcattttattatttcatttcagtattcatttatttcatttcttcatttcatttcatttcatttcacttcaagatggagactcgctctatcacccaggctggagtgcgccaccacacctggcatttcatatttcttcatttcatttattccattcccatattcccattcccattcaatttcaatccatttcatgacagagacttgctgcattgcccaggatggagtgcaccacacgcatttcataattcatttcattatttcatttcatnnnnnnnnnnnnnnnnnnnnnnnnnnnnnnnnnnnnnnnnnnnnnnnnnnnnnnnnnnnnnnnnnnnnnnnnnnnnnnnnnnnnnnnnnnnnnnnnnnnnttttttttgggggggtggggtgggtggagtttcgctcttgttgcccaggctggagtgcaatggtgtgatctcggctcaccacaacctctgcctcccgggttcaagagattctcctgcctcagcctcccaagtggctgggattacaggcatgtgccaccacgcccagctaattttgtagagtgagtctcaaaacaactgagggaaggcaaatctcaattctactaataggtctacacaatattagcactttttaaaaagcctgtaatattagcatgtgagatggatatgtctatagtgcttcaagtagttttcatctctgaaataattttaaaatcacagaatttaaagttacatgctggaaaggaccaatgaccttat

SEQ ID NO: 2162 - protein, 408 aa, Homo sapiens
  MOD_RES (317)..(350): Variable amino acid
MFHFIFISSFHLLHFISKRSLTLSPRLECITTASISLFISFHYFFISFHFTRHFIIHYFISSFHFIPFETETRSITQAGVCHCTWHFIIHFIISFHHFIYFIFSFHFISPGISLFISLFHFIISFHFISRRRLPLLPRLECATAPRISLFISLFHFIISFDHFISFQDRDSLYHPGWTAPPHLAFHYSFHPAFHISSHHFSFHLFHFISRRRRALLPRLECATTPGISFYYFISVFIYFISSFHFISFHFKMETRSITQAGVRHHTWHFIFLHFIYSIPIFPFPFNFNPFHDRDLLHCPGWSAPHAFHNSFHYFISXXXXXXXXXXXXXXXXXXXXXXXXXXXXXXXXXXFFWGGGVGGVSLLLPRLECNGVISAHHNLCLPGSRDSPASASQVAGITGMCHHAQLIL

SEQ ID NO: 2163 - DNA, 1285 bp, Homo sapiens
  source (1)..(1285)
  CDS (201)..(1085)
  modified_base (982)..(1081): a, t, c, g, unknown or other
tgataatgtagatattattcttgctcttattttttctgaatcatttgagaataagttgtagaggtcatgactccacttctaaatactaaatactgtgtctcctaaaaacaaccatcccttagataaccaaagtgcagtcattgaatttagaaaataacatctgatatgatactgttatttaatattgagtccatgttcaaatgttgccacttattatctggccacaatattattattattattatttatttatttatttttatttttattttttttttgagatggagtcttggtcttggtcgtccttgcccggctgttgctacttgctgctctcttatgtgtctctctcgtctcccttcttcttttctctcgcctcttgtgcctcttctgtgacctctcctattctatctcttctcttcgtcctgcttcccttctggtcgtgctctcgctcgtgtcgttccctctttctggtcgtgttgtgtgtgccatttctcgcgcgcgctctcctgccgcttcgcgctgctgttttggttgctcggtcgttctcgtctctcccgctgtctcggttttcttgtttgcgctttctctctctcttcttgctggtttcgtgttgtgtgctctttgtcccgtctcgtccgtcgcctcggcttcattttctgtttggtctgctttcctctctggctccccgtgctccctgtgttccgtgtggttcgtctctcttctcctcgtctgccgctcttctttctcttcgtttttgtctcgtgtctttctttctctccctcctcttcttccctctcgttcttgctcctctcctctcttctctccttgtgtccttcttcgctttcttctcttgcctctgtccttccgctgttcctgtcttctcctgctcccgctctttgtctgctttgtctttttcgtgctccctctactcgcgttcctgcttctggccgttgtgcggtcctgtcttctccgctcttccctnnnnnnnnnnnnnnnnnnnnnnnnnnnnnnnnnnnnnnnnnnnnnnnnnnnnnnnnnnnnnnnnnnnnnnnnnnnnnnnnnnnnnnnnnnnnnnnnnnnnttagccgcgtggtgaagaaactgaccccataatgagagagagaaaataagaatagctagcccttacctttgagccatttctaaaaccatcacacattggtttctcacacaccacttactgacttcacacctgtccctcctcctcctaaattacgagtccttgagagtggggatgctattttcctcacccctgcacccactgtgc

SEQ ID NO: 2164 - protein, 294 aa, Homo sapiens
  MOD_RES (261)..(294): Variable amino acid
MLPLIIWPQYYYYYYLFIYFYFYFFFEMESWSWSSLPGCCYLLLSYVSLSSPFFFSLASCASSVTSPILSLLFVLLPFWSCSRSCRSLFLVVLCVPFLARALLPLRAAVLVARSFSSLPLSRFSCLRFLSLFLLVSCCVLFVPSRPSPRLHFLFGLLSSLAPRAPCVPCGSSLFSSSAALLSLRFCLVSFFLSLLFFPLVLAPLLSSLLVSFFAFFSCLCPSAVPVFSCSRSLSALSFSCSLYSRSCFWPLCGPVFSALPXXXXXXXXXXXXXXXXXXXXXXXXXXXXXXXXXX

SEQ ID NO: 2165 - DNA, 1399 bp, Homo sapiens
  source (1)..(1399)
  CDS (201)..(1199)
  modified_base (937)..(1036): a, t, c, g, unknown or other
  modified_base (1058): a, t, c, g, unknown or other
tatttcgtgtctctggttctctggtctcttcggatatcgcttctgctgtgtcaggagccaggcgcccagtcatcgctcttgtgtccgctttttctagactctgtgtatatccttctctctttgtgcatgctctcctactcctctcccctctctcttctcccgcctctctgtgctttggtccgcgtgttctttagcttgtcatgtcagagggtctgccaggctccctgcggtcttttctggtctgcgcctgtcctcgtgcggttctccgtgtgcagctcctgctcgtgcttcgctggtgtctactctgtcgaggcgtgcccatggcgtcgctccgatcttgcctgtctctcccgttggtcgaccttctcacatccgtcgggtccgccgttctctccacgctgtccggtgctctttctcacctcggctcactcgtcctctggtgtgcctgtctgctgctctgtcgttccgtctgtttcgccctcgtacttcgcctcttgtgcaccgctctggctggcttcgccactgctgcgtgtccctccccgtgcctctctctcggctgtccctgcgccccggcgctcctgcccgtcggccccgtgcgctgtacccgtttcgttccttcgctgttgcctgtgttggggttctcgcacggctcttgcctcccttgctgctttgcttttgtgttcttgggttcgtcggtgttccgcgtcgctgtgcgcgtctccagcgggctctgtccagttgcttctcgtcctgtctgtcctgcgtctcttcgtctcgcttcgccagtcgctctctcatcttcgtcctctcctcgtgctgccgcgtcccgttcgtcgtgggtctggtctccttcgcgtgtcgtctgtgtcctctgttcgggctcgtgtcgcttctggtcgctgtcgtctcctgcgcggttcgccgctcttgggtctgnnnnnnnnnnnnnnnnnnnnnnnnnnnnnnnnnnnnnnnnnnnnnnnnnnnnnnnnnnnnnnnnnnnnnnnnnnnnnnnnnnnnnnnnnnnnnnnnnnnncttattggcagcaccgacgcgnaccttccaccccgtggtgaaaattttgccagttatctcgatggtatgctttgtagccctctactccaaaattctagtacgaggtccaatccagatcacacattacattagttgttatgattctattaaaacagccttttaaatatgtttaaaagaaatttaggccaggcacagtgctcatgcctgttatcccagcactttgggaggccgagacaggtggatcacttgaggtcaggagttcgagaccagcctgaccaatatggtgaaaccctgtctctactaaaaatacacaattagctgggcgtggtggcacatacctgtaatcccagctacttgaaaggc

SEQ ID NO: 2166 - protein, 332 aa, Homo sapiens
  MOD_RES (246)..(279): Variable amino acid
MSEGLPGSLRSFLVCACPRAVLRVQLLLVLRWCLLCRGVPMASLRSCLSLPLVDLLTSVGSAVLSTLSGALSHLGSLVLWCACLLLCRSVCFALVLRLLCTALAGFATAACPSPCLSLGCPCAPALLPVGPVRCTRFVPSLLPVLGFSHGSCLPCCFAFVFLGSSVFRVAVRVSSGLCPVASRPVCPASLRLASPVALSSSSSPRAAASRSSWVWSPSRVVCVLCSGSCRFWSLSSPARFAALGSXXXXXXXXXXXXXXXXXXXXXXXXXXXXXXXXXXLLAAPTXTFHPVVKILPVISMVCFVALYSKILVRGPIQITHYISCYDSIKTAF

SEQ ID NO: 2167 - DNA, 1177 bp, Homo sapiens
  source (1)..(1177)
  CDS (201)..(977)
  modified_base (341)..(440): a, t, c, g, unknown or other
tagcgtgtgcatcaaaatgaggtccccaaaagatattctttctctagatattgaggaaagctttaaggcaatctctggttcaaatttcaatcaataaaaagaatataaaatgaacactctctcatccaatcctgtctctagccaccaaattttcctccctggtgatagcctttattatctttttgtatgctaccccagagatgcttagtgcatatgcagaaagtgttagatattcattctcctccccgcttcacacaaatggcagctactatgcatactgcaacttgttttctttcccacatcctcttcagttgttttatctttgctcatcagctaggtannnnnnnnnnnnnnnnnnnnnnnnnnnnnnnnnnnnnnnnnnnnnnnnnnnnnnnnnnnnnnnnnnnnnnnnnnnnnnnnnnnnnnnnnnnnnnnnnnnngggtgtcctttcccctctttatgttttgtctgctttgttgaagatcagttgactgtaagtaattgggtttttttctgggttttctattctgatccatcggtctatgtgtctatttttatgccagtaccatgctgttttggtgactatggccttatatatagtgtgaaatcaggtagtgtgatgcctccacatttgttctttttgcttaatcttgctttggctatgtgggctcttttttggttccatataggttttagggttgttttttctagttttgtgaagaattatggtgctattttgatgggccttgccttctctctcttcattcctcttcctccgttgttctttttctccatattcattctacccatccatcagcatgggatatgtttccatttgtttgtgtcatctgtgatttctttcagcagtgtttgtagttttctttgtagaggtctttcacctcctggtttaggtatcccaagtatgttatttcatttttatgcagctactgtaaaagcagttgagctgttgccatgattcccctctcggccacagctcatgagtagcccgtcccttgatgtgtgtccttcgtctttttttcgccctcacaaattcaacacggcctatctttgtgtggggtgattctttgctaatttcagtgtcccattctcttacaaatcagttcagagatagaatattatagtgcgctgtggggcttaatttgcctaaatttcttt

SEQ ID NO: 2168 - protein, 258 aa, Homo sapiens
  MOD_RES (47)..(80): Variable amino acid
MLSAYAESVRYSFSSPLHTNGSYYAYCNLFSFPHPLQLFYLCSSARXXXXXXXXXXXXXXXXXXXXXXXXXXXXXXXXXXGCPFPSLCFVCFVEDQLTVSNWVFFWVFYSDPSVYVSIFMPVPCCFGDYGLIYSVKSGSVMPPHLFFLLNLALAMWALFWFHIGFRVVFSSFVKNYGAILMGLAFSLFIPLPPLFFFSIFILPIHQHGICFHLFVSSVISFSSVCSFLCRGLSPPGLGIPSMLFHFYAATVKAVELLP

SEQ ID NO: 2169 - DNA, 1015 bp, Homo sapiens
  source (1)..(1015)
  CDS (201)..(815)
ttatctgttacattttttctacaccacgtctgctgctcttcataaaatctaatgttaattccatttggctctatctctccttttcatgaaaaatttgcgtcttgactctttcactttgtggccaattgtgttctttcttccctctttcttgagtgtgttctgtctgttgccaatgccccaccattttagtctgataaactatggttttaaagacaaaatgctgcaacgtagtactaaatccatatctactttcaatttctttctttctgcttttccttcctgaccttcagctactgcaaaagagttgctcatcctctgtactcccacagcctttggtgtgtgtcctagcctcagtgttactagagatatatgtgttccaggtttttctgactgtgtcaagtgttttacataaagttagagtgggagcatttgggagactggcaagtcttggctgcctccccctattattttatggtgcaaggagaaaggaaacttccttgataaccatggcaggtttccatttgactgcctccactttccttattcgggctttgccactcaatgcccagcatgcttcccttgtcgtcagactgtatgtctgtgcattctctcatgggcttattcgctgtggagtgctactgcatctcagaaactccagctacgccctccaaaggcagagctcttcacatctttttgttgctattgttgttgtttgttttcgcatacctctcgagcctagcactagttcttccattctcatcatatttttattcacaggatttttgtcctacctaatcactctacatatgctctgaaaacatgccagacaattatgattttctatgtcttcactctcatttcttcaggaataccatcttgcattggtggcgtaaatagttggtgatggatacacatgggcagtcttctactgcacacaacttctagctcatcggaacatgttcctgtctatccatgcatagaacatgttctaagccttctgcttccagaacacgtt

SEQ ID NO: 2170 - protein, 204 aa, Homo sapiens [sequence omitted]

SEQ ID NO: 2171 - DNA, 14756 bp, Homo sapiens
  source (1)..(14756)
  CDS (201)..(276)
  CDS (979)..(1285)
  CDS (7613)..(7791)
  CDS (13694)..(14556)
  modified_base (6478)..(6577): a, t, c, g, unknown or other
  modified_base (13882): a, t, c, g, unknown or other
  modified_base (14082): a, t, c, g, unknown or other
  modified_base (14100): a, t, c, g, unknown or other
  modified_base (14561)..(14660): a, t, c, g, unknown or other
ttttgatttacaggtttattgggacgtgaccccatcgtaagtcaaggagcatctgtgtttattttctccttgtgtactgagcctttatgatatgccaggccctaggctgagactttttaaaagattcttcaaagaaactattttttagagcagtttgatgatcatggcaaaattgagtggaaagtacagagagttcccatatgcctcagactccacatgatacagcgttgccccctattagcaccccataccagcgtggcatgtttgttataatcggtgatcctacactgacactgacatgtcattgacatccaatgtctatagttcacattgaggtttaggctgagactctccgtgcaccctttcattcacactcagtccttactgctgtgcccattttacagatgaggaaacagaggcccaggagagttgcatgccttgcgtgaggtcacacagctaactgcctgcctccctccgttcatggctccttcagtcttcccttcctggaggcaggagctggctggtcctcaccaggtgtgctgaggcccctctgaggacagagcttgggtgtccctggtataccttgtcccagagccaccttggccactggagagagccattgtgcatctcgtttcaccctcgtctctctagattccctgtctcctctggaagaaaagcaggggctctcccctcacggaaatgtggcattcagcaaagctggtcggagcctgcatggagacactgaggcccctgtcaactgtagctcctgtcctgggcccccgacagcatcaccctcgaggccggtgcttcatctcctccagctccttttaagaacgaacttgatgaaaacacagactttacctacaagcccggcaggagctcatggtccacactcactcgctttggggctgacagccactttcccaggggagcctggggcctcccctcgactctcaccagggccttcgacccctccaggagcccccactctacctctagcttccccaggggctcctcagccacctcctgtgactccagagcgctcgttctcagcctctggggcccagatagtgtccaggtggcctcctctgcctggcaccctcctgacggaagcttcagcactttccatgatggaccccagcccctcgaagacccccatcaccctcctcgggcctcgcgtgctttctcccaccacctctagactctccacagcccttgcagccaccacccaccctggcccccagcagcccccagtgggggcttctcggggggaagagtccaccatgtaaggaggtcactgtgtccgggagactctggagagaggacctctgccagtggcccagggtgtgtgcagggcagctccaaggatgaacctggtggggatgcgtgggctccctcctgcaggggccctggtgaggatggaagacccccaaggctggatgtaaccttgttcccaagaagtgtttggaatgtgctgtaagaatggaggaagtcgtttccactgtcaggatcctccctggaccgcgtggctggctcatcttttgacaagggttgggactgccaagttctcctggaggaagagtcgcgtccggctgagattcccctcactggggctttggcgccaggtgtcgtgcgtctctctcaggtttcctgattaaaggttgtctcggtttccccaagctgcactgctcattcacccgcttacctgtgggaaggtgggaaacgtgaccccaagcccacaggtggtaagtgagcatccacctttaccccaccgccggggagaaaagctggcaccaaattgtgactgggctcgggaagggtctcctgcaagcacttggcggccttttatcttgggagacttcttctttcttttttccccaagatcatgattttcttttctgttttcttttttctttttttcacttttattttaagttcaggggtacatgtgcaggtttattatatagttaaactcgtgtcacaggggtttgtcatacagattatattatttcatcacccagggattaagcttagtacccattagttatttttcctaagtctctccctctaccctccctccacccttccatagaccccagtgtgtgcttttcgtgtctatgtgtccatgtgttctcatcatttagctcccacttacaaatgagaacatgcggtatttggttttctcttcctgcgtaactttgctaaggatgatggcctccagctccattcatgttcctgcaaaggacattatctcattcttttttatggctgcatagtatgtacaccatggaataccatacagacactggggggcttccacagtgagaagggaaaagatgatggagaggacttgcttctgggaaggaacctctgagacgaaatgacagaccagcagtttcttttttgagatggagtttcgctcttgttgcccaggctagagtgcaatggcaaggtcttggctcactgcaacctctgcctcctgggttcaagcggctctcctgcctcagcctcctgagtatctgggattacaggtgcccgcaaccacacctgactaattttttgtatttttagtagagttggggtttcaccatgttggctaggctggtctcgaactcctgacctcaggtgatctgcccaccttgggctcccagagtgctgggatgacaggcctgagccaccgcgccgggccgggccagcagtttcttaagacgtgttttcagcaggaacacctgtgggcagcggggaaggagcagggagggagagttggggctgctgggccttctcgaagcctcagccagccccctctgggagctctggggttaggctggcccttcggagctgtcctgagctggagctacggggcagggctttctgcctcatattgaccagagagctgctatcaaccaccttcccagcagctgggagactgatccttcagtcctagtggggggatctgggcagtgtagcacagtgtgcatgagagacggaaagaggacagtgccgtcatgaatggggggatgcggatttgtgataagggaagtgatgtggggctggaaagcagaagctgctctgtcaccaagtcaccacttgctaccatttttttttttttgagacaggatgttgccctgtcatccaggctggagtgtagtggcatgatcacggctcattgcagcctcaacctcatgggctcaagccttcctcccaccccagcttcccgggtgggtgggattagaggcacatgccaccacgcctgtctaacttttaaaaaaattttgtagaaatagggtctcgctgtgttgcccagactggtcttgaactcctaggctcaagcgatcctcccacttcagcctccctgagtactgggattacgggcctgcagccccacacttgctaccactgaaacccatggaggctgcggagtgaaagcacccccgggcatggcccatcgctttgccgaggccgccctcttctgagcccttctctgacctgctactcactctgtgtcccagggcgaagggtctgctgaagtgtttcctggctgcaaaggcaacctggtatccagtccagacgacagtgtagtcctggcctctaacctgcggctggtggcaggaataataaatgtgggagataggagcatggaaaccaaacagtttagagaggcaaaggacttagaggccgttttgtccagtaagatacaaagggtcatggtcatgagcggggtctgcagccaatgaatctcaagttggagccttgctcagctggactagctgtgggatattaggtctctgctcccttattattattattttttgagacagagtcttgctttgtcacccagcctggagtgcagtgacatgatctcggctcactgcaacctccacctcccaggttcaagtgattctcctgcctcagcctcccgagtagctgggattacaggcacacgccaccatgcccagctagtttttgtattttttgtagagatggggtttcgccacgttggccaggctggtctcaaactgacctcaggtgatctgcctgcctcggcctcccaaagtgctggggattacaagcatgaaccaccgcgccaggcctctgctcccttatttggacaatggggataataacaggcctactttatggagttgtgacaatgacgtgtgataatgcctccataagtctcagtggtttgcacttgtggccctgtggcccctaaacttgctacagcccacccggcttggtgatgccacgtggggtctgatttcaggataaaagcgtagaattctcattgcccccatgctgcaacttttcaaacaagtccatctgtcaaaatggtagtggctaaaaattagtgccaatttcctcattgctgttcctttatgcaataagttagcatgcaatttaagtttaatactagtcccccccacctgcctctgcaaataggactcatgtcaatgatgttcattttgaatgtttaaaaaaaaggagtccgggtgtggtggctcatgcctgtaatcccagcattttggaaagctgaggtgggcggatcacgaggtcaggaattcaagaccagcatgaccaatatggtgaaaccccatctttactaaaaatacaaaaattagccaagcgtgatggtatgtgccgatagtcccagctactcaggaggctgaggcaggagaatcgcttgaacctgggaagcagaggttgcagtgaaccaagatcgcaccactgcactcagagcctgggtgacagagcgagactccatctcaaaaaaaaaaaaagattggttgggggtggggcagggggacagctgtaaacacttttcccaagtttttccgagtataaaaacatgtttaactggactgttccccacccaatattacagctgagaagcagaggctcagagaagttaggagagtgttctaaggctgcacagattatgacggcggaatgggaagacagcctcattcggtctgactcccagtccaggtgtttttccttcgcttcacatttcacctgatgaggttctcctgttggtgtttggagagactgctgatggcccacagtttagcagggcccctgtgaacactattttagtttggttccccctaaagcagacccagagatagtattcgggtgagaccaatataagaaacgaatcaaggcgattgatgagccggttgcaggtatgcgcaattggcagtttgtcgtagggaccttgtggaagactgtggagcccatgcgttgcctgaggattgtcccccaagggtgtgaagatgcaccagtagttgtccctcaactttcgtccctcagtggtcgagccttgtcgtggcgttttggctctctagcacaccctggtggccttgccatagtactgagcctgcctttgtgcttgtccccaggcaccagaagtgtcttggggcagaggtgcaggagccatgggtggagggctgggtcaggggtgtgactgggccatgtaagcacatgttgtgtgcacggtaaaccgcagtgcaccaggaggcaggagtccacgtgaagcccccagcggggcgcgcagtgcctttaatgggataagctgctctgaattctcgggagcctgtgctccaacaagcaagggagtgtttgttcttggatggagacaccttgcatttttcctgagctaggattccacttttagggttttgagaaacagaacagaatgggggtgtgtcggaagcttattctgtggcctcagtttcccttgcacctggcagcttctcaaagggcagaatgatcagacctgtttcaagagacctgattttaaaggttattagatgcatggcctgaaggcaagtcacggtaggtttctaagtaggacaaacttacagaggctcaaaatcgctgtaattcacttttttttttttttaacttaccctctttttaagatctttccgaggctgggagtggtggctcacatctgtaatctcagcactttgggaggccgaggtgggtggatcatgaggtcaggagttccagaccagcctggccaacatggtgaaatcccgtctctactaaaaatacaaaaattagctggtgtggtggcaggtgcctgtaatcccagctattcaggaggctgaggcgggagaattgcttgaacccgggaggccgaaattgcagtgagctgagatcatgccactgcactccagcctgggagacagagcaagactccgtcttaaaaaaaaaaaggtctttccatcttagcacccagtgagcacatttgcttcttccttttacagctgtatattgtgtggatgcaccataagttgttgaaccaactcctgtggatgcacttttgggtcatttcaaatcttgcttttccacatgatgctacaaaaaatcatgtccttacatcgctttgcacatctactagtgtatctttaaggtaaattttcagaagggaagttactgagccatatgctcctttctctctcagacggagttnnnnnnnnnnnnnnnnnnnnnnnnnnnnnnnnnnnnnnnnnnnnnnnnnnnnnnnnnnnnnnnnnnnnnnnnnnnnnnnnnnnnnnnnnnnnnnnnnnnnagaacatgagttgtcatacagcaacagggaaactgatgatgtaaaggcactacagggatcccccaggtcttcccacagtctctttgaacttcatctttcaacactgctatttacagagcacctactgtgtgctggggacacagctaagcacaaggaagccccagtccccttggtccggaagcccactgcctaggtgggttgatggccgggtgcccagggctcctgatgcctttttggaaggcgggatgttaagtagagacctggagggtggtagggactcatcaggtggggagctgaggttgctgtacccagcagagggtggaggattggagatggccgttctgcctggagcatggagagagtcaggcaggcggcaaggctgcaggtaggggttgcatcttgggttgtgttccctagaagcagggccagtgcaggcgacttaccaagggagtgctctcagaagaaactggcgagggaagaagggtggggcaggagaggaagcagggtgaaggtgtggtctcacactgatccctgggaagctctgggcagtggaccgtgctggggagcaaggctattgcacctcagggccagtcagttatagagactctctctgctccccagggagtgggggtggtgaccatctaggcatctctggaggacgcagctgccgtcagccactggcagtacttcggagacaggacctgggtgggcactgacagcctctgcccctgactcagtcctgaagggctccaccagctgcattgagggctttgcactcagtgaagctgccaaatggtttaggcagtagggagcctggatggaagcgggagggtgagagatggtgaaggccgtgcctattcccaggatgccctcctgggctcacacccagcccccattgaaggactcccagttccccccaccccactgttgtgctccttggagatttctttgtcagtttcactttagtagatttctttgtcagtttcacttgagtagccgggagggtgatggcaggcagcctgcggcctcctctagctctccatggtccccaggcagggtgccgccctcatcattctgtgcctgggctctcttccagaatggggaggtggagtgctccttcatgccctgccctgagctggcctgcccccgagaagagtggcggctgggccctgggcagtgttgcttcacctgccaggagcccacaccctcgacaggtgagctggtccagggctgccccgacacagggcatggatactggggagagaggctgagcttcacctgctgctgagactgctggtgtgtgtgctgtttgtgtgtgtgtgtacatgtgtctttgtgtgcgtgtgtatgagtgtgagtttttgtgtagtgtgtctgagtgtgtacctgtgtgtgtaagtttgtgtgtctctgagtttgtgagtggttatctgtgtgttggtgtgttagtggtacctgcgtatgtgtgtctttgtatttatgtatatgagtgtgtgtctgtgttttgtgtagtatgtctatgtgtctctctgtgggtgtgtgtgtatgtgtctgtgtttttgtgtgtgcctgggtgagcatgcatctttgtgtctgttgtgtctgcatatgtgtgtgtgcatgtaagtgtatgtttgtatgagtgtgtctgcgtgagagtaagtttgtgtgtctgtgtgtgagtagtgtgcgtccgtgtgagcatgtatgtgtatgtgtgcatttgtatgaatgtgtgtaaatttgtgtacatgtgtctttgcctgtgtacgagtgtgtatctgtgttttgtgtagtatgtcttagtatgtgcctgtgtgtgtgtgtttctgtgtttctgaatagttttctgtgtgtgtgtgtcagtgtgttaatggtatctgtgggagtctgtgtacatgtgtctttgtgtatgagcatgtatgtgtatttttgtgtagtatgagtgtgtctctgtggtatgtatgttatgtgtctgtttttgtgtttttgtgtgtgcctgtgtgagcatgcatgtctgtatgtgtgtatgtgcatgtaagtgtatgattctatgagtgtgtctgtgtgtaagtttgtgtctctctgagtagtatctgtgtgtgtgtgtctgagcatatgtatgtgtatgtaagtgtatttgtatgagtgcgcgtccgtgtgagttgtatctgtgtgtgtacgtaaatgtgcatttgtatgagtatgtgtgtgtctgtgtgcatgtgtgtctgtgccgtatctgtgtgtgtatgtaaatgtgcatttgtatgagtatgtgtgtgtctgtgtgcatgtgtgtctgtgttgtatctgtgtgtgtatgcaaatgtacatttgtatcagcatgtgtgtctgttgtatctgtgtgtgtatgcaaatgtacatttgtatcggtatgtgtatgtctctgtgcatgaatggtatctgtgtgtacatgtatatttaagtgtgcatttgtatgagtgtatgtgtatctgtgtgaattgtatctgtgtaagtgtgcatttgtatgagtgtgtgtaagtttgtgtgtccgtgtgtgagtgatatcggtgtctgtgtgtgtttgtgcgcatgaggcatctgtccttgctgctgttgtagtctaggtcttgtgccgtcttttctctgccattgtcctcatccaggctgctctcttgacgacaacggggttgagtttccgattggacagatctggtcgcctggtgacccctgtgagttatgcatctgccaggtgaatgacaacctgctcgccttcagctgctttacctggctgccccgcctcacccagaggagacaagcgtcctggcccctccagaggctggcctcaggctggccgcagtctccctccggtgctgtcaagttccactttcacaaaaagggttggaccgagtttatcctgctctcagtagatgtgtgaggacgatggtgcttggcagttggccttaagaagtgtgtattgttggccaggtgcggtggctcacgcctgtaatcccagcactttgggaggccgaggtgggtggatcacaaggtcaggagatcgagaccatcctggctaacatggtgaaaccctgtctctactaaaaatacaaaaaattagccgagcgtggtggtaggtgcctgccttcccagctactcgggaggctgaggcaggagaatcgtttgaacccgggaggaggaggttgcagtgagctgagatcacgccactgcaccccagcctggcgacaaagcaagaaggagtctcaaaaaaaaagaaaaaaaaagtgtgtatggccaagagtggtggctcacgcctataatcccaacatagctgaggtgggaagattgcttgagcccaggaatttgagaccagcctgggcaacatggtgagaccctgtctctacaaaaaaatacaaaaattagctgcatgtagtgacatgcccctgtggtcccagctacttgggaggctaaggtgggaggatcgcttcctcagctcctgaggctgacccaggaggtcgaggctgcagtgagccgtgatcacatcactgcattccagcctgggcagaagagaaagatcctgtttcaaaaaaaaaaaaaaaaaaaagtgtgtgtaacacagtgtgcatgtgcagggagctgctggcatgaggagtaagaattaggaatcttcatagaaggttttccccaggcatggataactgagggagtggggtagcctgagacccagttgttcaggctgtttctgtgaaattgcaatgttttcttcatgactgcaaaagatgtgacctcaccatttcagaaatgagtaaggaggtgcatgagtttgagtcagatcaacaacaatgcaaacacagctatccacccagaaatacaattgttttagctcattattgaagtactagtaattgcagttttttaccattacttacaatggcagaaaccgcaattacttttgcaccaatctaatacatgctggctttcctttctactttaagagcttcgagtcttttagaggtttatttctcaaaatgaggtcccttgcacctgcgttgggagccctggttagacgtgcagcctttcgaggccctgcccacacctctgctctcacaaactgcattttaacctccaggtgatttgtgtgcactttcatgtgggagaagcccagccttctagtgccttcgatgagccgtttgttaaaaagctgtaagctgggccgggcgcggtggctcacgcctgtaatcccaacgctttgggaggccgaggcaggtggatcatgaggtcaggagattgagaccatcctggctaacatggtgaaaccctgtctctactaaaaatacaaaaaaaattagctgggcgtggtcgcgggcacctgtaatcccagctactcgggaggctgaggcaggagaatggcgtgaacccgggaggcggagcttgcagtgagtcaagatagagccactgcactccagtctgggcaaaagagtgagactccgtctcaaaaaaaaaaaaaaaaaatgctgtaagctgaacacgtctcattgaaattagagttgggaggaaagtccttcctgtgctgtcttctcctttatgactgatttcgggcacccataatcagtcaccaagagagtgatacaaaaggttcaaactgtcagattgtttttgtgtttttttcttttaaagaaaaagaggccggttgcggtggctcacacctgtaatcccagcactttgggaggccaaggcaggtggatcatctgaggtcaggagttcaagacgagcctgaccaacatggtgaaaccccatctctactaaatatacaaaaattagcctggcgtggtggcgcatgcttgtaatcccagctactcgggaggctgaggcaggagaaccatttaagcccgggaggtggagtttgcagtgagccaagattgcgccattgcactccagcctggcaatagagtgagactccgtcttaaaaagaaaaaaaaaaaaagaaagaaaccttgtatggcactttggctctctgaaatagacacttctggtggcattgttttttctaaaaatagggttttatggtactctgtaggttcctggtgagccagggttccagggaaaagctgagaaaggatttggatggtggtgaaggtgtaggctttggctgctacaggaagcggaggagaccagaatcccaaccctgaccttccttctccttaaagatgcatagacttcctggaaggctcacatggcctttctcaagtagccgatcctctttaggggagacctgccatcttccagccgcgtcatgttgccttcagggcaagccttggccagtttgcagcgttgctgtttcttttgcagggcggggaggcaggggccggtgtcaccggtggggtcttggtgaagttcctccttcctccaggcagatggctcggtgagctgcaagaggacagactgtgtggactcctgccctcacccgatccggatccctggacagtgctgcccagactgttcagcaggtaatcccctgcctctgccccaagcccccagggcagggcatctcaggcatcgggctccttaagccctatacagccttcatctcatgtcgtcctaacaaccccaagggacaaccccattgcacagataaggaaactgaggtagaacagtttacccaagtcaggccccctctgagtgctcgaggcagatctgaagacacgcagggcttacggtgcaggtgggtggtacaggagctgcacctgtgagacaattggaggacagcaggaggagagaaattttaacagtcatttttgcgttttaatagtcatttttaccttttccatgatttcagaagtaatgttttattatagaaaatttatcttatttttttgagacagagccttgctctcttacccacgccggagtgcactggcgtgatctcagctcactgcaacctccacctcccgggttcaagtgattctcctgcctcagccttctgagtagctgggatcacaggtgcccaccaccatgcctggctaatttttgtatttttagtacagatggggtttcaccatgttggccaggctggtctcgatctcctaacctcaggtgatctgcctgccttggcctcccaaagtgctgggattacaggcatgagccaatgcacccagctccattatagaaaatttacaaaaaaagtacagaaagcaaaaataaagaatattagcaaggttctattagcactgttaaatttgtgtttatgtccttctagtctctttttgtgatgctcacacacatttagtagatgtacattatatatataatatatatataaacatacatatattcatttatcttagtttatttttttaaagcttcccctactgtctcatcacctgcttttacacttagcagtatatgatagtgtcatccaaggtggcatcactcacatcaggcttctggggctgtcaggaatcagagaggggagtagtgttggggaatgttctggacaggcggggttggtggtttgagtgagtttggagggcagagaggaggttgggaagatgctgtggggcctcacacacacctcgtatttcccagttcttccacctgatcccccctggtgaggaggtagaggatgaatctccccactcttcagggtgaggacactgaggccaagacacttgatccttttgctgaatccagtgggaaaaaagtcaatacccgattcagacaatccaaacaggcgttttgtcccttccctaactcccagggtgactgcctggggaggcacatggcctcccctttgccatccagataagcctgtgaccttggccctggcgggaagcctggtgcctggccactcccagctggtgctcagcgcatgctctctctggcaggctgcacctacacaggcagaatcttctataacaacgagaccttcccgtctgtgctggacccatgtctgagctgcatctgcctggtatggaccacccagatctgactcccgcccctggaaactcccccacaactgacatcggctcctgaatcccagaggcaaaatccagagacctccaagacaagggatgcttctggttcatggtggaagtcagatccctccagtcctgcccagggtgaccctttagacagggccgggggggttggtctgtgtgtggtgtttgtgggtggggggcccgtgttctggtggccgccggggtgcccgggggttgtgtcgttgcctggtgggtcgtgcgtccgttggggctgccgcctggcggtgggggttgcggggtgtttccccggggggctttgctgtgggcgttgtgtttcgtgcgcgtnggttgcgtggtgcggcgtgtgcgcggcgtgttggttgctccgctgggggcgtggcggtgcgtcgtgcggctgtggtgccgcggccgcgttggcgtgccgttgtgcgtggttgtgtgtgctcgggcgttggtgcgctcggtgcgtgcgtcgggggggtggtgtcggcgggctggttggggcccgggtgtgcgtgtgtgtgntgcgcgcgtgggcggccncgggtggtgtgtgtcgcgtgcgtgccggctggctggtgcggcgggtggggggtggcgtgtgcgttgggggcgggtgtggcgcgggcgtgcggtgcgcgctgtgtcgacctgctggcggcgtgtcgtgtgcgcgcggtggccgtggcgtgcgcctgtgctggcgtggtgtgtggggctgctgctggccggcgggtgggcgggtgggtcgcgcgggcgcgcgtgtgggcggtgttggcgggcggtgtgtgtgtgcgtggggtggtggtgctgggtcgtgtggctggtgcgctgtcgttcgcttggtgtcgcgtggcgggcgcgtgtgtgtgtgtggtccgcgcgtgtgtggctggggtgctggtgcgtcgtgctgggctgtggtgtgtgggtgggtgcgtgtcgtggtgtgtggctgcgtggctgtgggtgcgtggtgttgtggcggtgccgggctgttcgcnnnnnnnnnnnnnnnnnnnnnnnnnnnnnnnnnnnnnnnnnnnnnnnnnnnnnnnnnnnnnnnnnnnnnnnnnnnnnnnnnnnnnnnnnnnnnnnnnnnngtttacttgttcttatcttgtgctcattcgtctcttttctcttctcacttatcttctcttctttcctatttcttcctttcttcacttcttttctta

SEQ ID NO: 2172 - protein, 475 aa, Homo sapiens
  MOD_RES (251): Variable amino acid
  MOD_RES (317): Variable amino acid
  MOD_RES (323): Variable amino acid
MPQTPHDTALPPISTPYQRGMFVIIGAPTLPLASPGAPQPPPVTPERSFSASGAQIVSRWPPLPGTLLTEASALSMMDPSPSKTPITLLGPRVLSPTTSRLSTALAATTHPGPQQPPVGASRGEESTISPWSPGRVPPSSFCAWALFQNGEVECSFMPCPELACPREEWRLGPGQCCFTCQEPTPSTGPGGLVCVWCLWVGGPCSGGRRGARGLCRCLVGRASVGAAAWRWGLRGVSPGGFAVGVVFRARXLRGAACARRVGCSAGGVAVRRAAVVPRPRWRAVVRGCVCSGVGALGACVGGVVSAGWLGPGCACVXCARGRXRVVCVACVPAGWCGGWGVACALGAGVARACGARCVDLLAACRVRAVAVACACAGVVCGAAAGRRVGGWVARARVWAVLAGGVCVRGVVVLGRVAGALSFAWCRVAGACVCVVRACVAGVLVRRAGLWCVGGCVSWCVAAWLWVRGVVAVPGC

SEQ ID NO: 2173 - DNA, 1465 bp, Homo sapiens
  source (1)..(1465)
  CDS (201)..(1265)
tatacctctctatatatattcctatatatatattccagagatatatattcctatatatatatattccagagatatatattcctatatatatattccagagatatatattcctatatatatattccagagatatatattcctatatatattcctctctatatatattcctatatatattcctacatatctatattccggatatgtatatacattcctacatatctatattccggatatgtatatacattcctacatatctatattccggatatgtatatacattcctacatatctatattccggatatgtatatacattcctacatatctatattccggatatgtatatacattcctacatatctatattccggatatgtatatacattcctacatatctatattccggatatgtatatacattcctacatatctatattccggatatgtatatacattcctacatatctatattccggatatgtatatacattcctacatatctatattccggatatgtatatacattcctacagatctatattccggatatgtatatacattcctacagatctatattccggatatgtatatacattcctacagatctatattccggatatgtatatacattcctacagatctatattccggatatgtatatacattcctacatatctatattccggatatgtatatacattcctacagatctatattccggatatgtatatacattcctacagatctatattccggatatgtatatacattcctacatatctatattccggatatgtatatacattcctacatatctatattccggatatgtatatacattcctacatatctatattccggatatgtatatatattcctacatatctatattccggatatgtatatatattcctatatctatattccggatatatatatattcctatatatgtattcttatatatatattccacatatatattcttatatatatatattccacatatatatattcttatatatatattccacatatatatattttcttatatatatatattccacatatatattcttatatatatattcttatatatatatattccacatatatatattcttatatatatatattccacatatatatattcttatatatatatatgccacatatatatatattcttatatatatatattccacacatatatatattcctatatatatattccagataaaagatggtggtcacccaggccatgatgccaacagtgatggtggtaaaaagtggccaagctctggatgtatttttacaaacagagcagagaggatctgctgatggaatggatgtcagctatgaagggaaaagaggaggtcaactgtgaagggaaaagaggaggcagggatgacttcagaattctcggccagagctgctggggaaatggagattccatcaactgaga

SEQ ID NO: 2174 - protein, 354 aa, Homo sapiens
MYIHSYISIFRICIYIPTYLYSGYVYTFLHIYIPDMYIHSYISIFRICIYIPTYLYSGYVYTFLHIYIPDMYIHSYISIFRICIYIPTYLYSGYVYTFLHIYIPDMYIHSYRSIFRICIYIPTDLYSGYVYTFLQIYIPDMYIHSYRSIFRICIYIPTYLYSGYVYTFLQIYIPDMYIHSYRSIFRICIYIPTYLYSGYVYTFLHIYIPDMYIHSYISIFRICIYIPTYLYSGYVYIFLYLYSGYIYIPIYVFLYIYSTYIFLYIYIPHIYILIYIFHIYIFSYIYIFHIYILIYIFLYIYIPHIYILIYIYSTYIYSYIYICHIYIYSYIYIFHTYIYSYIYIPDKRWWSPRP

SEQ ID NO: 2175 - DNA, 1585 bp, Homo sapiens
  source (1)..(1585)
  CDS (201)..(1385)
  modified_base (3)..(12): a, t, c, g, unknown or other
  modified_base (14): a, t, c, g, unknown or other
  modified_base (17): a, t, c, g, unknown or other
  modified_base (20): a, t, c, g, unknown or other
  modified_base (820)..(919): a, t, c, g, unknown or other
  modified_base (1090): a, t, c, g, unknown or other
cannnnnnnnnnanggntgnagatgttgactagagaggaacagacacagacacacacaaacacacacatttgctgggatgacagaaatggtcttattttgttctgggtgagaacttgatggcattgaggcatgaaaacttaccagagtggccaggtgcggtggttgacgcctggtgtgccgtcgcgggttggaagattacatgaggtcgggagtggtaaaccagtctggtcgtgatggggaaactttgtgtgtgtgggggtttcgggttttggccatgtgtggcgcggcgcgtctggtggtcgctggtccttttcgggcgctcggcggtttattgggtttccgcgcgggggcgggtggggcgtggtgggttttggttttccgtgcctttttcgcccgtttcggctcgccttttttttttccttttcctttgtgtcgggtgccccttcccgtttttgggtgtggtggtgtgtgtttcggggttgtttccgtctttttgtttttttttgtcccgcgccgcgcgggtccgattgttttgccggcttttgcgcggttggctttggccctttcgcgggttcggtttgtcgcgggcgtgttgtgttcgttttccgcttgggtgcggtcggttccttcgggtctgttcgcttttccgtttctcgcgttcttccgtggtttttcggtctggcccgggtgctacggtttgcagcgctgttgtttgcgtgccgttctggctgtggttctttgtgatgtcgtgcgcggcgtgttacgcttgtgggtagtcgttgtcgcgcgcgcttatacaaaaactaaaaaaatagaatnnnnnnnnnnnnnnnnnnnnnnnnnnnnnnnnnnnnnnnnnnnnnnnnnnnnnnnnnnnnnnnnnnnnnnnnnnnnnnnnnnnnnnnnnnnnnnnnnnnntcatcaacttctgcactcaagcctgggtgaaagagtgatactctgtctcaaaaaaaattttttttttttaattagccagatgtgggggcacgtacctatagtcccagctactcaggaggctgaggggggaggattgcttgaaaccaggagtttgaggctgcagggagctgnaattgtgccactgcactgcagcctgggtgacagagggagatcctatttctttttttttggggggggggggacggagtctcgctttgtctcccaggctggagtgcaggggcattgtctctgctcattgcaacctccacctcctgggttcaagcaattcttttgcctcagcctccaaaatattagagggattagggttgggattacagttgcctgccaccatgcccggctaatttttgtatttttagtagagatggggtttcaccatgttggctatatgctggtcttgaattcctgacctcaggtgatctgcctacctcggcctttcaaagtgctgggattatagacatgagccaccatgcccagcttgatcctatttcaaataaataaataaaatagacacagtattggccaagatttgagtaaattaataagcgctgatcagagtgcagagaattgggctgtttctatacaaaaccaatagaaatgcaaattgat

SEQ ID NO: 2176 - protein, 394 aa, Homo sapiens
  MOD_RES (207)..(240): Variable amino acid
  MOD_RES (297): Variable amino acid
MRSGVVNQSGRDGETLCVWGFRVLAMCGAARLVVAGPFRALGGLLGFRAGAGGAWWVLVFRAFFARFGSPFFFPFPLCRVPLPVFGCGGVCFGVVSVFLFFFVPRRAGPIVLPAFARLALALSRVRFVAGVLCSFSAWVRSVPSGLFAFPFLAFFRGFSVWPGCYGLQRCCLRAVLAVVLCDVVRGVLRLWVVVVARAYTKTKKIEXXXXXXXXXXXXXXXXXXXXXXXXXXXXXXXXXXHQLLHSSLGERVILCLKKNFFFLISQMWGHVPIVPATQEAEGGGLLETRSLRLQGAXIVPLHCSLGDRGRSYFFFFGGGGTESRFVSQAGVQGHCLCSLQPPPPGFKQFFCLSLQNIRGIRVGITVACHHARLIFVFLVEMGFHHVGYMLVLNS

SEQ ID NO: 2177 - DNA, 1354 bp, Homo sapiens
  source (1)..(1354)
  CDS (201)..(1154)
gtttctctgttcaaagagaaaggggcctcggcatctcaagcccccgagctccatgaccatctctcacacactgtcttcacctcctgtgttctcaggcagctccatcgactcagtgaccagctcctccgctgccagggctctgaggtcttggctgctcaccccctgggtttgccccactgtttctgatcggcctcctttgcatgtctgcacagccctgcccttcctccttcctggatggcccctccttgtggctcttcctgctgtttcccatcacccggccctgctgctgtgaggagttcaggccacctgggattgcagtgctggcctggcagaggcttcccttcctctgtggccctggctgtgccagcctcctgtctgctgccccacagcctgtggcctgtccactctacacacggtgccttttgtccctgcgcccatcccaattcctgtccttctcactcttccttcaaaacagcattttccaaacattttggagtgcagcttatggtcagaaaagcatttttatcacaactgtgcgtgtgtgtgtgtgtatgtgtatgtgtatatgtgcatgtgtgtatgtgtgtgtttgtgtatatgtacatgtatgtgcgtatgtgttttgtgtttgtgcatgtgtgtttgcatgtctgtgtctgtgtgtatgcatgtgtgtatgtgtgtgcgcattatgtgtgtatatgtgggtatgtgtatgtgtgtgcatgtatgcatgtatatatgtgtatgtgtgtatttgtacgtgtgtatgtgtgtctctgtgtgtgtgtatgtacctgtgtgtgagtttatgtgggtatgtgtgtacatatgtgtgtatatgtgtatatgtgtatgtgtttatgagcatgtatgggtgtgtatgtatgtgtgtgtgcatgtgcatgtatgtatgtgttaatgtgtttatgtgtatgtgtgtgtgcatgtgtatatgtgcgtatgtgcgtgtgtatatatgtgcatgtgtgcgtgcatgtattgtgtgtatatgtgtatgtgtgtgtatgtgtgtgcatttgtatatatgtgtatgtgtgtgtctgtgtgtgtttatgtgtgtgtgcgtgtgtgtgtgtgtgtatgtgtgtgtatgtataactgaaacaaaagtttcacaaaatagcatgtagtctgcgccatgcaatctgtttattttccattctgttctattaatacttcatttttataaaacgtgttggttgcaacccacgaaattcatgccctgacccctgtgtgtcactagcggcagcccagagccactgcagcccacagcccagtcagcgcctcccccgaagcctgcccacatccacagacgtggtttggcttctgc

SEQ ID NO: 2178 - protein, 317 aa, Homo sapiens
MSAQPCPSSFLDGPSLWLFLLFPITRPCCCEEFRPPGIAVLAWQRLPFLCGPGCASLLSAAPQPVACPLYTRCLLSLRPSQFLSFSLFLQNSIFQTFWSAAYGQKSIFITTVRVCVCMCMCICACVYVCVCVYVHVCAYVFCVCACVFACLCLCVCMCVCVCALCVYMWVCVCVCMYACIYVYVCICTCVCVSLCVCMYLCVSLCGYVCTYVCICVYVYVFMSMYGCVCMCVCMCMYVCVNVFMCMCVCMCICAYVRVYICACVRACIVCICVCVCMCVHLYICVCVCLCVFMCVCVCVCVYVCVCITETKVSQNSM

SEQ ID NO: 2179 - DNA, 1168 bp, Homo sapiens
  source (1)..(1168)
  CDS (201)..(968)
gagacatcatgagaaattgcaaggcctatttttgcaaggagatgctttaagaacatcaagcttaggctgccagctggaatattataatcataataccaatcaaagagaggtagggggacagtgggatgggatggagtgggatagggctcattaatgactgaaatattagggagggataaggatgtgtccaacacaatgtgatgatgatgatggtgatgatgatgatggtgatgatgatgatggtggtgaggatgatggtgatgatgatgatggtggtgaggacgatggtgatgatgatgatgctggtgatgatgatggtgataatgatggtgatggtgatgatggtgatgatggtggtgatgatgatggtgatgatgatggtgatggtgaggatggtggtgatgatggtggtgatgatgatggtgatggtgatgatgacagtgatgatggtggtgaggatgatggtggtgatgatggtggtgaggatgatggtgacgatggtggtgatgatgatggtgatgatgatggtgatgatgatgatggtgaggatgatggtgatgatgatggtggtgatgatggtggtggtgaggatgatggtgatgataatggtggtgaggatgatggtgatgatgatgatgctggtgatgatgatggtgataatgatggtgatggtgatgatgatgatgatggtgatggtgatgatggtgatgaggatgatggtgatgatgatgatggtgttggtgatggtttttgcatcttccattcatgaactaagtactcttattagtgattttcttttgtttgccatcttatcctatgatttcactcttgtattcttttactcttcaagtataggaaacttggcttgccaaatatattatgagctccttaaagacaaggctttgggatatatgttctatgtagtgtgtggtgatgaaagcttgggctttgcagtcagaccgacctgactcagcaacacactgacctctgtgaccctgaataggtgagtttatgtctctgagcttctgctttcccatctgcagagaggggataatgatacacctacacaacagggaggctgagaggactgagtgagataatgctacagagtgatgaggagtggccattatcactgtgaacactgtagaagcctaataaatatttgaca

SEQ ID NO: 2180 - protein, 255 aa, Homo sapiens
MMMMVMMMMVMMMMVVRMMVMMMMVVRTMVMMMMLVMMMVIMMVMVMMVMMVVMMMVMMMVMVRMVVMMVVMMMVMVMMTVMMVVRMMVVMMVVRMMVTMVVMMMVMMMVMMMMVRMMVMMMVVMMVVVRMMVMIMVVRMMVMMMMLVMMMVIMMVMVMMMMMVMVMMVMRMMVMMMMVLVMVFASSIHELSTLISDFLLFAILSYDFTLVFFYSSSIGNLACQIYYELLKDKALGYMFYVVCGDESLGFAVRPT

SEQ ID NO: 2181 - DNA, 1192 bp, Homo sapiens
  source (1)..(1192)
  CDS (201)..(992)
tgcagatggagtgagcatttcccaaaaaataaactggctgacatcattagaggaaactgcaagtttttttatttttgttttttcactggtttgcagctttgattttctgcccctggattttgtaggtgatcatctgggagctccatgtatgtgtgtgtgtgtgtgtatctgtgtgtatatatatatacacacacatatatatgcatatatatacacatacacacacgtgtgtatatatgtatatacacacatacacacacgtgtgtatatatgtatatacacacatacacacacgtgtgtatatatgtgtatacacacatacacacacgtgtgtgtatatatgtgtatacacacatacacacacgtgtgtgtatatatgtgtatatgtgtatatatacacacgtgtgtatatatgtgtatatgtgtatatatacacacacgtgtgtatatatgtgtatatatgtatatatacacacatgtgtgtgtatatgtatatatacacgtacatgtatgtgtgtatatatgtatatatacacacgtgtgtatatgtatatatgtatatatacacacgtgtgtatatgtatatatgtatatatacacacatgtgtgtatatgtatatatgtatatatacacacatgtgtgtatatgtacatatacacacacatatctgtgtgtatatgtatatatacacacacatatctgtgtatatatgtatatacacgcacacacatatctgtgtatatatgtatatacacgcacacacatgtgtatatatgtatatacacgcacacacatgtgtatatatgtatatacacgcacatacatgtgtatatatgtatatatacgcacatacatgtgtatatgtgtatatatacatgtatgtgtatatacgcacatacatgtgtatatgtgtatatatacgtgcatgtatatatacatatatacatgtatgtgtgtatatacatataaacatatatatgtatatatataatattttttaagaattatactgaggtcgggtgcattggctcacgcctgtaatcccagcacgttgggaggccagggcaggtggatcacttgaggtcaggagttcgagaccagcctggtcaacatggtgaaaccccatctatactaaaaaaaaaaaattagctgggcgtggtgttgcacacctgcaatcccaactactcagga

SEQ ID NO: 2182 - protein, 263 aa, Homo sapiens
MHIYTHTHTCVYMYIHTYTHVCIYVYTHIHTRVYICVYTHTHTCVYICVYTHTHTCVYICVYVYIYTRVYICVYVYIYTHVCIYVYICIYTHMCVYMYIYTYMYVCIYVYIHTCVYVYMYIYTRVYMYICIYTHMCVYVYMYIYTHVCICTYTHTYLCVYVYIHTHICVYMYIHAHTYLCIYVYTRTHMCIYVYTRTHMCIYVYTRTYMCIYVYIRTYMCICVYIHVCVYTHIHVYMCIYTCMYIYIYTCMCVYTYKHIYVYI

SEQ ID NO: 2183 - DNA, 1180 bp, Homo sapiens
  source (1)..(1180)
  CDS (201)..(980)
  modified_base (284)..(285): a, t, c, g, unknown or other
  modified_base (288)..(290): a, t, c, g, unknown or other
  modified_base (292)..(294): a, t, c, g, unknown or other
  modified_base (314): a, t, c, g, unknown or other
  modified_base (316): a, t, c, g, unknown or other
  modified_base (318): a, t, c, g, unknown or other
  modified_base (321): a, t, c, g, unknown or other
  modified_base (326): a, t, c, g, unknown or other
  modified_base (328)..(333): a, t, c, g, unknown or other
  modified_base (336)..(338): a, t, c, g, unknown or other
  modified_base (342)..(343): a, t, c, g, unknown or other
  modified_base (345): a, t, c, g, unknown or other
  modified_base (347): a, t, c, g, unknown or other
  modified_base (350): a, t, c, g, unknown or other
  modified_base (496): a, t, c, g, unknown or other
  modified_base (766)..(865): a, t, c, g, unknown or other
gagcctggctgcaggtctgtgttttaactactaggcatgctgcttgttcatgccagaaactactactactattattgctactaataatttatatacaaatatatatattatatacaaatatatatatatttttatacaaatgtatatgggatagaagtgtatatgtatattctggtacgtatttatatacgcatgtatatatgtatatacatgtgtcatggcagacacacatgtatatctgcatacaaatatatatattagtctcaagtatatatcttggtctnnatnnntnnnatgcacggttatacaggttntntnggnatgcntnnnnnnggnnncganntntngtntttttgtttttagccttttttgtgctttctgactatttgtccatttttgcgtttttatttttttcctcttgtgctttgttgtctttttttttgctggttcctattgtttctttgctctctgttttcgctttttttaggagtctttnttttttttttcctctttctttttcctgtcttctttttatattgctgtttgttgtgtttttggtccggcttattttgtttttgttttctttctttatttttgcttctctttttttttttttggtttatttttctttttttccggtttttttgatttatgctctgggtttttacttttttctggtcgtcgggttgttttttacgcgcggagtctttcttgtcttttcttttttctgttttctcacgcacttttttgtgtttttttttttttnnnnnnnnnnnnnnnnnnnnnnnnnnnnnnnnnnnnnnnnnnnnnnnnnnnnnnnnnnnnnnnnnnnnnnnnnnnnnnnnnnnnnnnnnnnnnnnnnnnnctggtggccatcttgctaccatgaggcccacctaaaaataaagctaatatgcaggaaagcaaagtccagagaaggagagacagagaggagagctcctggatccccctgtgcctgaaagccacttatcccaagaattttccattcttagagcctgtagcttaaacctatatgaattgggtttctggcacttgctaccatcatgagtcctgaactatgggagaaggctaggatgggatgtacacagtagtcatctcatcaatgaccttgatgaggctgggcctttaagaggagaccaaccctggatgtgtactgccg

SEQ ID NO: 2184 - protein, 259 aa, Homo sapiens
  MOD_RES (28)..(32): Variable amino acid
  MOD_RES (38)..(46): Variable amino acid
  MOD_RES (48)..(50): Variable amino acid
  MOD_RES (99): Variable amino acid
  MOD_RES (189)..(222): Variable amino acid
MYIHVSWQTHMYICIQIYILVSSIYLGXXXXXARLYRXXXXXXXXXRXXXFLFLAFFVLSDYLSIFAFLFFSSCALLSFFLLVPIVSLLSVFAFFRSLXFFFPLSFSCLLFILLFVVFLVRLILFLFSFFIFASLFFFLVYFSFFPVFLIYALGFYFFLVVGLFFTRGVFLVFSFFCFLTHFFVFFFFXXXXXXXXXXXXXXXXXXXXXXXXXXXXXXXXXXWWPSCYHEAHLKIKLICRKAKSREGETERRAPGSPCA

SEQ ID NO: 2185 - DNA, 1600 bp, Homo sapiens
  source (1)..(1600)
  CDS (201)..(1400)
aaaggtccttatccccctggtctcttgtttctagacttcgcacatatttaagtttgttacctctactgtctttcctcttttcaaacagtatctatgcctgccaaatgtgaacatacaaaaaacaaatcagaatatgccattctgatttaaactgcttattagttaataccctcaagataacatctgggttcttagctgcaatgagtcaagcttacatctttttttgtctttggctgcacatttcctatcacatcacactccagcaataccaagctgtgccgtccttctaccccatctccactattttgcccccatccgccgcggctttttcccccccaccccgcctcagctttttgcccgccacggctttttgccccctgcctccgcggctttttgccccctgcctccgcggctttttgcctccgcggctttttgcccgacccggctttttgaccccccgccgccgctgctttttgcatccccgccgccgctgctttttgcatccccgccgccgtggctttttgcccgccgcggctctttccgcccaccgccgcggctttttgtcgccgcggctttttgccaaccgaggctttttatcctacgccgccgcggctttttccccgacccggctttttgctcccccgccgccgcgactttttcacccccgccgccgtggctttttgccgccccggtgccgcggttatttgcccgtcgcggctttttgcacccccgtcgccgcggctttttgccccctgctgccggctttttgctcgaaccggctttttgcccccccccccccccaccgccacggctttttcacccccgccgccgcggctttttgccctcccggtgccgcggttatttgcccccccccggtgccgcggttatttgcccgtcgcggctttttgcatccccgtcgccgcggctttttgcccccctgccgccgcggctttttgcctccgcagctttttgcatcccccccccccccgtggttttttgtttccgcggctttttccccccccccccccggcttgttgccggcttcggctttttgcccccccccccccgccactgtggctttttggcccccccccccgccactgtggctttttgccccccccccccgccactgtggctttttgcccccccactcccccccgccactgtggctttttgcgtctttgtgcccccgccgccctggctttttgcccgcgccaccactgctttttgcacctttttgcccccgccgccgcggctatttgccccccgccgccgcgacgttatatggttttttgctcccactgctttttgcctccgccgccgcggctttttgcccccccaccaccgcagctttttgcgcgtctcggctttttgccccatggccatcgtcagaagtgtgagtggaacagagggaagggaaagctgttttcttcgaaagctcaaaaatcttcaacttttaaatagggataagtgttatttttgctccaagcacacatttgagaaatcttccatttagcggatctgatgataaacccacatttttgtttgttttaatctgaaaatgtatttgtatggttcttggaaatatttttttcatata

SEQ ID NO: 2186 - protein, 399 aa, Homo sapiens
MSQAYIFFCLWLHISYHITLQQYQAVPSFYPISTILPPSAAAFSPPPRLSFLPATAFCPLPPRLFAPCLRGFLPPRLFARPGFLTPRRRCFLHPRRRCFLHPRRRGFLPAAALSAHRRGFLSPRLFANRGFLSYAAAAFSPTRLFAPPPPRLFHPRRRGFLPPRCRGYLPVAAFCTPVAAAFCPLLPAFCSNRLFAPPPPHRHGFFTPAAAAFCPPGAAVICPPPVPRLFARRGFLHPRRRGFLPPCRRGFLPPQLFASPPPPWFFVSAAFSPPPPGLLPASAFCPPPPATVAFWPPPPPLWLFAPPPRHCGFLPPHSPPPLWLFASLCPRRPGFLPAPPLLFAPFCPRRRGYLPPAAATLYGFLLPLLFASAAAAFCPPTTAAFCASRLFAPWPSSEV

SEQ ID NO: 2187 - DNA, 1372 bp, Homo sapiens
  source (1)..(1372)
  CDS (201)..(1172)
cctatctcaaaataaataaataaaggacacattcttatcagctgtagtcaccacgttcattacaccttagaacccgctaatctcataactgcacctttgttccctgtgaccctcaactcccggtcccctccagccctgacagccactgttcactctgcttctgtgagttccgctttttcacacgtcactcgagtgaggccatgtgctgtttgtctttctgtgcctggcttatctcacttaccacaaatgcccttcaggttcatcgtgtcctcacaaatggcgggcttgccctgccctgccctgccctgccctcccttcccttcccttctctctctctcctttctctctctctgtctctctctctctcccccccttcccttttcctcctgtggaataacactcctgtatgtgtgtgtacgcatgtgtgtgtatacgcgtgtgtgtacgcatgtgtgtgtatacgtgtgtgtacgcatgtgtgtgtatacgtgtgtgtgtacgcatgtgtgtgtatttcttcccttccctcccctccccttccctcccctccccttccctcccctccccttccctcccctccccttccctcccctccccttctttcccctccccttccctttccctccctgtggaataacactcgtgtgtgtgtgtgtgtgtgtgtgtgtgtgtgtgtatgcatgtgtgtgtatttctccccttcccttcctttccctcccctcctccctcccctcccttcccctccccttccttttcccttctgtggaataacgcttgtgtgtgtgtgtgtgtatatatgcatgtgtgtatatttctccctttcccttcctttccctcccctcctcccttccctcccctcctcggtcccttcccctccccttccctttccctccctgtgggataacactcgtgtgtgtgtgtgtgtgtgtgtgtatgcatgtgtgtgtatttcttccctcccatcccccctctcctcccctcccttccccacccttccctttccctcctgtggaataacactcctgtgtgtgtgtgcatgcatgtgtgtgtatatttctcacatattttcattcatgcatccgttgatggacacttgggttgattccgtgtcctggctgctgggacagtgctgcgatgaacacgagggtacagacgcctctcctacacgctaatttcaactctttggatatacacccagcagtgggattgctggatcaggtgggagctctatttccacatttttgaggaacctccctgccgtctcccatggtggctgtgccaacgacgttcccagggacagagtgcaacgggcccctttcctccatgtcctcgccaacactcgctatcttttgcgttttgatgacagtcatcc

SEQ ID NO: 2188 - protein, 323 aa, Homo sapiens
MCCLSFCAWLISLTTNALQVHRVLTNGGLALPCPALPSLPFPSLSLLSLSLSLSLSPPSLFLLWNNTPVCVCTHVCVYACVYACVCIRVCTHVCVYVCVYACVCISSLPSPPLPSPPLPSPPLPSPPLPSPPLLSPPLPFPSLWNNTRVCVCVCVCVCVCMCVYFSPSLPFPPLLPPLPSPPLPFPFCGITLVCVCVYICMCVYFSLSLPFPPLLPSLPSSVPSPPLPFPSLWDNTRVCVCVCVYACVCISSLPSPLSSPPFPTLPFPSCGITLLCVCACMCVYISHIFSFMHPLMDTWVDSVSWLLGQCCDEHEGTDASPTR

SEQ ID NO: 2189 - DNA, 1501 bp, Homo sapiens
  source (1)..(1501)
  CDS (201)..(1301)
  modified_base (880)..(979): a, t, c, g, unknown or other
caaccatatttttaaagctacatatacattttttccaaattaatttagttaacactgaataatgaaatccttaaatccacttatccgggtgcacacaaaatatagtaagtggcaacatgctgaagatgaatgagtatgtgagggtgggtggcctatctcaccaacctcataacgtgtggctttgacatttggagtacgtgatggtgccagcatcatcgatctggattttatctaaaaatatatatacacatacatatgtatgtatgtatgtgtatatgtatgtatgtctgtgtgtgtatgtatatgtatgtgtgtgtgtatatatatgtgtgtgtgtgtatatatatatacagggtgtgtgtgtatatatatatatatatatacagggtgtgtatatatatatatatatatatacagggtgtgtatatatatatatatatatatatacagggtgtgtatatatatatatacagggtgtgtatatatatatatacagggtgtgtatatatatatatacagggtgtgtatatatatatatacagggtgtgtatatatatatatacagggtgtgtatatatatatatacagggtgtgtatatatatatatacagggtgtgtatatatatatatacacggtgtgtatatatagtgagacacaccctgtatatatatatatacacaccctgtatatatatatatacacaccctgtatatatatatatacacaccctgtatatatatatatacacaccctgtatatatatatatacacaccctgtctatgtatacatacacacccggcaccagcaggatactcacaccttgtctctggaggcatacacagcctgccctggctattatccccacatccaaaagttgnnnnnnnnnnnnnnnnnnnnnnnnnnnnnnnnnnnnnnnnnnnnnnnnnnnnnnnnnnnnnnnnnnnnnnnnnnnnnnnnnnnnnnnnnnnnnnnnnnnngtgtgtgtgtgtatatatatacacacacacatacacatatatatatatgcacatacatgctgacaccctgtccccggtgcctgcctcctttgtctctgtccccatgccaagcagtgtgctgtcaccccgcttcagttttgagcagaagtgcacatgtggtgccacctgtgggaagtgtggtgggggtggccttgcagtcacttgtcactgcgtgagccactcccctggcctcctctgccgctgtccttcctcctatgggggaaaaggaggtggttctctcacagaactgtggctaaagggtgacagccctcaccaaaggtgagactcatgagcatcgggaagaaagtagcagtggagtgtccggttagttttctctgcggactggagcagccgggcatcagagccctgggagctcgggcaccaccagtggtcagcgctggccctggacgtccctagttcactgggccgcgtttcagcgccctctgctggctcgatggactggccgccctcgcttgcagctcc

SEQ ID NO: 2190 - protein, 366 aa, Homo sapiens
  MOD_RES (227)..(260): Variable amino acid
MVPASSIWILSKNIYTHTYVCMYVYMYVCLCVYVYVCVCVYICVCVYIYIQGVCVYIYIYIQGVYIYIYIYTGCVYIYIYIYTGCVYIYIQGVYIYIYRVCIYIYTGCVYIYIQGVYIYIYRVCIYIYTGCVYIYIQGVYIYIYTVCIYSETHPVYIYIHTLYIYIYTPCIYIYTHPVYIYIHTLYIYIYTPCLCIHTHPAPAGYSHLVSGGIHSLPWLLSPHPKVXXXXXXXXXXXXXXXXXXXXXXXXXXXXXXXXXXCVCVYIYTHTYTYIYMHIHADTLSPVPASFVSVPMPSSVLSPRFSFEQKCTCGATCGKCGGGGLAVTCHCVSHSPGLLCRCPSSYGGKGGGSLTELWLKGDSPHQR

SEQ ID NO: 2191 - DNA, 2350 bp, Homo sapiens
  source (1)..(2350)
  CDS (201)..(2150)
  modified_base (2): a, t, c, g, unknown or other
  modified_base (7): a, t, c, g, unknown or other
  modified_base (9): a, t, c, g, unknown or other
  modified_base (13)..(15): a, t, c, g, unknown or other
  modified_base (17)..(18): a, t, c, g, unknown or other
  modified_base (20)..(21): a, t, c, g, unknown or other
  modified_base (23)..(24): a, t, c, g, unknown or other
  modified_base (31): a, t, c, g, unknown or other
  modified_base (34): a, t, c, g, unknown or other
  modified_base (39): a, t, c, g, unknown or other
  modified_base (41): a, t, c, g, unknown or other
  modified_base (49): a, t, c, g, unknown or other
  modified_base (51): a, t, c, g, unknown or other
  modified_base (71): a, t, c, g, unknown or other
  modified_base (73): a, t, c, g, unknown or other
  modified_base (77): a, t, c, g, unknown or other
  modified_base (85): a, t, c, g, unknown or other
  modified_base (90): a, t, c, g, unknown or other
  modified_base (92)..(93): a, t, c, g, unknown or other
  modified_base (95): a, t, c, g, unknown or other
  modified_base (99)..(100): a, t, c, g, unknown or other
  modified_base (103): a, t, c, g, unknown or other
  modified_base (106): a, t, c, g, unknown or other
  modified_base (109): a, t, c, g, unknown or other
  modified_base (111): a, t, c, g, unknown or other
  modified_base (113): a, t, c, g, unknown or other
  modified_base (170)..(171): a, t, c, g, unknown or other
  modified_base (179): a, t, c, g, unknown or other
  modified_base (195): a, t, c, g, unknown or other
  modified_base (197): a, t, c, g, unknown or other
  modified_base (209): a, t, c, g, unknown or other
  modified_base (212): a, t, c, g, unknown or other
  modified_base (214): a, t, c, g, unknown or other
  modified_base (216): a, t, c, g, unknown or other
  modified_base (218): a, t, c, g, unknown or other
  modified_base (290)..(291): a, t, c, g, unknown or other
  modified_base (302): a, t, c, g, unknown or other
  modified_base (309): a, t, c, g, unknown or other
  modified_base (315): a, t, c, g, unknown or other
  modified_base (317): a, t, c, g, unknown or other
  modified_base (320): a, t, c, g, unknown or other
  modified_base (323): a, t, c, g, unknown or other
  modified_base (327): a, t, c, g, unknown or other
  modified_base (332): a, t, c, g, unknown or other
  modified_base (337)..(338): a, t, c, g, unknown or other
  modified_base (342)..(343): a, t, c, g, unknown or other
  modified_base (346): a, t, c, g, unknown or other
  modified_base (348): a, t, c, g, unknown or other
  modified_base (350): a, t, c, g, unknown or other
  modified_base (356)..(357): a, t, c, g, unknown or other
  modified_base (359): a, t, c, g, unknown or other
  modified_base (362)..(363): a, t, c, g, unknown or other
  modified_base (365): a, t, c, g, unknown or other
  modified_base (368): a, t, c, g, unknown or other
  modified_base (370): a, t, c, g, unknown or other
  modified_base (373): a, t, c, g, unknown or other
  modified_base (375): a, t, c, g, unknown or other
  modified_base (378): a, t, c, g, unknown or other
  modified_base (380): a, t, c, g, unknown or other
  modified_base (383): a, t, c, g, unknown or other
  modified_base (385): a, t, c, g, unknown or other
  modified_base (389): a, t, c, g, unknown or other
  modified_base (391): a, t, c, g, unknown or other
  modified_base (396)..(397): a, t, c, g, unknown or other
  modified_base (399): a, t, c, g, unknown or other
  modified_base (402)..(403): a, t, c, g, unknown or other
  modified_base (405): a, t, c, g, unknown or other
  modified_base (407): a, t, c, g, unknown or other
  modified_base (411)..(412): a, t, c, g, unknown or other
  modified_base (414): a, t, c, g, unknown or other
  modified_base (419)..(420): a, t, c, g, unknown or other
  modified_base (422)..(426): a, t, c, g, unknown or other
  modified_base (428)..(429): a, t, c, g, unknown or other
  modified_base (431)..(432): a, t, c, g, unknown or other
  modified_base (434)..(436): a, t, c, g, unknown or other
  modified_base (438)..(439): a, t, c, g, unknown or other
  modified_base (441)..(444): a, t, c, g, unknown or other
  modified_base (446)..(451): a, t, c, g, unknown or other
  modified_base (453): a, t, c, g, unknown or other
  modified_base (456)..(466): a, t, c, g, unknown or other
  modified_base (471)..(476): a, t, c, g, unknown or other
  modified_base (478)..(479): a, t, c, g, unknown or other
  modified_base (480)..(483): a, t, c, g, unknown or other
  modified_base (485)..(490): a, t, c, g, unknown or other
  modified_base (492)..(497): a, t, c, g, unknown or other
  modified_base (499)..(501): a, t, c, g, unknown or other
  modified_base (503)..(506): a, t, c, g, unknown or other
  modified_base (508)..(513): a, t, c, g, unknown or other
  modified_base (515)..(517): a, t, c, g, unknown or other
  modified_base (520): a, t, c, g, unknown or other
  modified_base (522)..(526): a, t, c, g, unknown or other
  modified_base (531): a, t, c, g, unknown or other
  modified_base (533)..(538): a, t, c, g, unknown or other
  modified_base (540)..(542): a, t, c, g, unknown or other
  modified_base (544)..(546): a, t, c, g, unknown or other
  modified_base (548)..(550): a, t, c, g, unknown or other
  modified_base (552)..(556): a, t, c, g, unknown or other
  modified_base (558)..(560): a, t, c, g, unknown or other
  modified_base (564): a, t, c, g, unknown or other
  modified_base (566)..(568): a, t, c, g, unknown or other
  modified_base (570)..(575): a, t, c, g, unknown or other
  modified_base (577)..(579): a, t, c, g, unknown or other
  modified_base (582)..(584): a, t, c, g, unknown or other
  modified_base (586)..(593): a, t, c, g, unknown or other
  modified_base (595)..(602): a, t, c, g, unknown or other
  modified_base (606)..(612): a, t, c, g, unknown or other
  modified_base (614)..(618): a, t, c, g, unknown or other
  modified_base (620)..(623): a, t, c, g, unknown or other
  modified_base (625)..(627): a, t, c, g, unknown or other
  modified_base (629)..(631): a, t, c, g, unknown or other
  modified_base (633)..(634): a, t, c, g, unknown or other
  modified_base (636)..(637): a, t, c, g, unknown or other
  modified_base (639): a, t, c, g, unknown or other
  modified_base (641)..(645): a, t, c, g, unknown or other
  modified_base (647)..(649): a, t, c, g, unknown or other
  modified_base (651)..(653): a, t, c, g, unknown or other
  modified_base (655)..(656): a, t, c, g, unknown or other
  modified_base (662)..(667): a, t, c, g, unknown or other
  modified_base (669)..(672): a, t, c, g, unknown or other
  modified_base (674)..(677): a, t, c, g, unknown or other
  modified_base (680)..(682): a, t, c, g, unknown or other
  modified_base (684)..(688): a, t, c, g, unknown or other
  modified_base (695)..(697): a, t, c, g, unknown or other
  modified_base (699)..(703): a, t, c, g, unknown or other
  modified_base (705)..(711): a, t, c, g, unknown or other
  modified_base (713)..(715): a, t, c, g, unknown or other
  modified_base (717)..(718): a, t, c, g, unknown or other
  modified_base (720)..(721): a, t, c, g, unknown or other
  modified_base (724)..(730): a, t, c, g, unknown or other
  modified_base (732)..(735): a, t, c, g, unknown or other
  modified_base (737)..(741): a, t, c, g, unknown or other
  modified_base (743)..(746): a, t, c, g, unknown or other
  modified_base (748)..(751): a, t, c, g, unknown or other
  modified_base (753)..(756): a, t, c, g, unknown or other
  modified_base (759)..(776): a, t, c, g, unknown or other
  modified_base (778)..(779): a, t, c, g, unknown or other
  modified_base (781)..(880): a, t, c, g, unknown or other
  modified_base (941): a, t, c, g, unknown or other
  modified_base (1089): a, t, c, g, unknown or other
  modified_base (1199): a, t, c, g, unknown or other
  modified_base (1327): a, t, c, g, unknown or other
  modified_base (1332): a, t, c, g, unknown or other
  modified_base (1337)..(1338): a, t, c, g, unknown or other
  modified_base (1343): a, t, c, g, unknown or other
  modified_base (1348)..(1349): a, t, c, g, unknown or other
  modified_base (1354)..(1355): a, t, c, g, unknown or other
  modified_base (1361)..(1362): a, t, c, g, unknown or other
  modified_base (1368)..(1369): a, t, c, g, unknown or other
  modified_base (1376)..(1377): a, t, c, g, unknown or other
  modified_base (1384): a, t, c, g, unknown or other
  modified_base (1393): a, t, c, g, unknown or other
  modified_base (1395): a, t, c, g, unknown or other
  modified_base (1468): a, t, c, g, unknown or other
  modified_base (1470): a, t, c, g, unknown or other
  modified_base (1472): a, t, c, g, unknown or other
  modified_base (1474): a, t, c, g, unknown or other
  modified_base (1476): a, t, c, g, unknown or other
  modified_base (1478): a, t, c, g, unknown or other
  modified_base (1485): a, t, c, g, unknown or other
  modified_base (1491): a, t, c, g, unknown or other
  modified_base (1493): a, t, c, g, unknown or other
  modified_base (1495): a, t, c, g, unknown or other
  modified_base (1497): a, t, c, g, unknown or other
  modified_base (1499): a, t, c, g, unknown or other
  modified_base (1508): a, t, c, g, unknown or other
  modified_base (1510): a, t, c, g, unknown or other
  modified_base (1519): a, t, c, g, unknown or other
  modified_base (1521): a, t, c, g, unknown or other
  modified_base (1528): a, t, c, g, unknown or other
  modified_base (1530): a, t, c, g, unknown or other
  modified_base (1539): a, t, c, g, unknown or other
  modified_base (1616)..(1617): a, t, c, g, unknown or other
  modified_base (1619): a, t, c, g, unknown or other
  modified_base (1624)..(1625): a, t, c, g, unknown or other
  modified_base (1627)..(1628): a, t, c, g, unknown or other
  modified_base (1633): a, t, c, g, unknown or other
  modified_base (1636): a, t, c, g, unknown or other
  modified_base (1638)..(1639): a, t, c, g, unknown or other
  modified_base (1647): a, t, c, g, unknown or other
  modified_base (1650): a, t, c, g, unknown or other
  modified_base (1653): a, t, c, g, unknown or other
  modified_base (1767): a, t, c, g, unknown or other
  modified_base (1771): a, t, c, g, unknown or other
  modified_base (1775): a, t, c, g, unknown or other
  modified_base (1778)..(1779): a, t, c, g, unknown or other
  modified_base (1782): a, t, c, g, unknown or other
  modified_base (1785)..(1786): a, t, c, g, unknown or other
  modified_base (1789)..(1790): a, t, c, g, unknown or other
  modified_base (1793)..(1795): a, t, c, g, unknown or other
  modified_base (1797)..(1799): a, t, c, g, unknown or other
  modified_base (1803): a, t, c, g, unknown or other
  modified_base (1807): a, t, c, g, unknown or other
  modified_base (1809): a, t, c, g, unknown or other
  modified_base (1811): a, t, c, g, unknown or other
  modified_base (1813): a, t, c, g, unknown or other
  modified_base (1815): a, t, c, g, unknown or other
  modified_base (1817): a, t, c, g, unknown or other
  modified_base (1819): a, t, c, g, unknown or other
  modified_base (1821): a, t, c, g, unknown or other
  modified_base (1824): a, t, c, g, unknown or other
  modified_base (1826): a, t, c, g, unknown or other
  modified_base (1828): a, t, c, g, unknown or other
  modified_base (1830): a, t, c, g, unknown or other
  modified_base (1832): a, t, c, g, unknown or other
  modified_base (1834): a, t, c, g, unknown or other
  modified_base (1837): a, t, c, g, unknown or other
  modified_base (1839): a, t, c, g, unknown or other
  modified_base (1841): a, t, c, g, unknown or other
  modified_base (1843): a, t, c, g, unknown or other
  modified_base (1846): a, t, c, g, unknown or other
  modified_base (1848): a, t, c, g, unknown or other
  modified_base (1851): a, t, c, g, unknown or other
  modified_base (1853): a, t, c, g, unknown or other
  modified_base (1855): a, t, c, g, unknown or other
  modified_base (1858): a, t, c, g, unknown or other
  modified_base (1860)..(1861): a, t, c, g, unknown or other
  modified_base (1863): a, t, c, g, unknown or other
  modified_base (1865)..(1866): a, t, c, g, unknown or other
  modified_base (1868): a, t, c, g, unknown or other
  modified_base (1871): a, t, c, g, unknown or other
  modified_base (1873): a, t, c, g, unknown or other
  modified_base (1876): a, t, c, g, unknown or other
  modified_base (1885): a, t, c, g, unknown or other
  modified_base (1887): a, t, c, g, unknown or other
  modified_base (1909): a, t, c, g, unknown or other
  modified_base (1929): a, t, c, g, unknown or other
  modified_base (2128): a, t, c, g, unknown or other
  modified_base (2145): a, t, c, g, unknown or other
  modified_base (2153): a, t, c, g, unknown or other
  modified_base (2159)..(2161): a, t, c, g, unknown or other
  modified_base (2163)..(2165): a, t, c, g, unknown or other
  modified_base (2168)..(2169): a, t, c, g, unknown or other
  modified_base (2172)..(2174): a, t, c, g, unknown or other
  modified_base (2177)..(2178): a, t, c, g, unknown or other
  modified_base (2180)..(2182): a, t, c, g, unknown or other
  modified_base (2188)..(2189): a, t, c, g, unknown or other
  modified_base (2192)..(2193): a, t, c, g, unknown or other
  modified_base (2195)..(2196): a, t, c, g, unknown or other
  modified_base (2199): a, t, c, g, unknown or other
  modified_base (2201): a, t, c, g, unknown or other
  modified_base (2205): a, t, c, g, unknown or other
  modified_base (2208)..(2209): a, t, c, g, unknown or other
  modified_base (2214): a, t, c, g, unknown or other
  modified_base (2218): a, t, c, g, unknown or other
  modified_base (2220): a, t, c, g, unknown or other
  modified_base (2223): a, t, c, g, unknown or other
  modified_base (2226): a, t, c, g, unknown or other
  modified_base (2229): a, t, c, g, unknown or other
  modified_base (2231): a, t, c, g, unknown or other
  modified_base (2234): a, t, c, g, unknown or other
  modified_base (2236)..(2237): a, t, c, g, unknown or other
  modified_base (2242): a, t, c, g, unknown or other
  modified_base (2246)..(2247): a, t, c, g, unknown or other
  modified_base (2251): a, t, c, g, unknown or other
  modified_base (2254): a, t, c, g, unknown or other
  modified_base (2256): a, t, c, g, unknown or other
  modified_base (2260): a, t, c, g, unknown or other
  modified_base (2265): a, t, c, g, unknown or other
  modified_base (2267): a, t, c, g, unknown or other
  modified_base (2269): a, t, c, g, unknown or other
  modified_base (2273): a, t, c, g, unknown or other
  modified_base (2275): a, t, c, g, unknown or other
  modified_base (2277): a, t, c, g, unknown or other
  modified_base (2285): a, t, c, g, unknown or other
  modified_base (2289): a, t, c, g, unknown or other
  modified_base (2297): a, t, c, g, unknown or other
  modified_base (2334): a, t, c, g, unknown or other
  modified_base (2340): a, t, c, g, unknown or other
  modified_base (2345): a, t, c, g, unknown or other
tncggtncngtannncnnanncnnacttttnccntgccnancaagcgtnangttacttttactgaatgatngnaagnaagatagnaagtnanntnatgnnatngangtncntnctacttttacctgcatcatcatcatcatcatcatcatcatctgctgacacgacacgnncttttcangacacgacatgatgtnantttatgatgatngtnantnangccggtccctgcaccatcacatcgacgtaccatttcatgcatctactttctgcacgatcttcgatgatgtanntttattgttgnttgttgnttgatngnatngtngtantttanttcannacgnnacngncngaccanncnacnnancgnancgnancgnancgnangcangnaccanngncgnncngnacanngnacganngnnnnnanncnngnnnanngnnnncnnnnnncngcnnnnnnnnnnngatgnnnnnngnnannngnnnnnnannnnnngnnngnnnngnnnnnngnnnaangnnnnngcccngnnnnnngnnnannngnnnannnnnannnaggnannnannnnnngnnnaannngnnnnnnnnannnnnnnngacnnnnnnnannnnngnnnngnnngnnngnngnnangnnnnngnnngnnngnnnnnngnnnnnngnnnngnnnngannngnnnnngcctttnnngnnnnngnnnnnnngnnngnngnnagnnnnnnngnnnngnnnnngnnnngnnnngnnnngannnnnnnnnnnnnnnnnngnnannnnnnnnnnnnnnnnnnnnnnnnnnnnnnnnnnnnnnnnnnnnnnnnnnnnnnnnnnnnnnnnnnnnnnnnnnnnnnnnnnnnnnnnnnnnnnnnnnnncccccccctccccccccccccccctcccccccccccccccccccccctttttttttttttnttttttttttttttttttttttttttttttttttttttttttttttttttttttcccctctccccccccccccccccccccccccccccccccccccccccccccccccccccctttttttttttttttttttttttttttttttttnttttttttttttttttttttttttttttttttttatttccccccccccccccccccccccccccccccccccccccccccccccccccccgccccccccccttttttttntttttttttttttttttttttttttttttttttttttttttttttttttttttttttttttttcttcttctccccccccccctccccccccccccccccccccccccccccccccccccccccccctnttttnttttnnttttnttttnnttttnntttttnntttttnntttttannttttttnttttttttntnttttttctccctcttctctctctctcctctctctctctctctctctctctctctctctctctctctctctctntntntntntntatatantttttntntntntnttttttttntnttttttttntnttatttntnttttttctnttttcccttttcccttttcccttcccctctcccctccccttcccctcccccccccccccccccccccccctcctctnntnttttnntnntttanttntnnttttttanttnttntttttttttttttttttttttttttttttttttttttcttcttttttcttcttcttctccctttccttccccctcctcctcctccctcccccctccctcctcctccctctattntttntttnttnnttnttnnttnnttnnntnnnttcnttcntncntncntncntncgntncntncntncgntncntncgntncgntncntancnntncnntncgntngcnttcgcttcncnattcgtttcgctatcccttttnctatttctatttcgtttttnccttttcctttttcccttttttcccttttttccctttttttccccttttttcccccttttttttccccctcttttttttcccccccctttttttttttttccccccccccccccctccttttttttttttttttttttttttttttatttttttttttccccctttttttttttttttttttccccttttttttttttncctttttataagccctnattaggcngttttnnncnnnttnngcnnnttnncnnnttgcgnnttnncnnttncnttancgnnttcgnattncnttncgnttncnttncnnttcgnttcnnttcnttncnttcnttcgntncnttcntncnttcgttcnttcnttcttcgnttcttcttcattcgtcattcttcatcatcgtgcttcnttatcnttttnctgaa

SEQ ID NO: 2192 - protein, 649 aa, Homo sapiens
  MOD_RES (3)..(6): Variable amino acid
  MOD_RES (30)..(31): Variable amino acid
  MOD_RES (34): Variable amino acid
  MOD_RES (37): Variable amino acid
  MOD_RES (39)..(41): Variable amino acid
  MOD_RES (43)..(44): Variable amino acid
  MOD_RES (46): Variable amino acid
  MOD_RES (48)..(50): Variable amino acid
  MOD_RES (52)..(64): Variable amino acid
  MOD_RES (66)..(69): Variable amino acid
  MOD_RES (71)..(89): Variable amino acid
  MOD_RES (91)..(109): Variable amino acid
  MOD_RES (111)..(120): Variable amino acid
  MOD_RES (122)..(134): Variable amino acid
  MOD_RES (136)..(163): Variable amino acid
  MOD_RES (165)..(227): Variable amino acid
  MOD_RES (247): Variable amino acid
  MOD_RES (297): Variable amino acid
  MOD_RES (333): Variable amino acid
  MOD_RES (376): Variable amino acid
  MOD_RES (378)..(381): Variable amino acid
  MOD_RES (383): Variable amino acid
  MOD_RES (385): Variable amino acid
  MOD_RES (387)..(388): Variable amino acid
  MOD_RES (390): Variable amino acid
  MOD_RES (392)..(393): Variable amino acid
  MOD_RES (395): Variable amino acid
  MOD_RES (398)..(399): Variable amino acid
  MOD_RES (423)..(426): Variable amino acid
  MOD_RES (429): Variable amino acid
  MOD_RES (431)..(433): Variable amino acid
  MOD_RES (436)..(437): Variable amino acid
  MOD_RES (440)..(441): Variable amino acid
  MOD_RES (443)..(444): Variable amino acid
  MOD_RES (447): Variable amino acid
  MOD_RES (472)..(473): Variable amino acid
  MOD_RES (475)..(476): Variable amino acid
  MOD_RES (478)..(480): Variable amino acid
  MOD_RES (483)..(485): Variable amino acid
  MOD_RES (523)..(533): Variable amino acid
  MOD_RES (535)..(559): Variable amino acid
  MOD_RES (562)..(563): Variable amino acid
  MOD_RES (570): Variable amino acid
  MOD_RES (577): Variable amino acid
  MOD_RES (643): Variable amino acid
  MOD_RES (649): Variable amino acid
MMXXXXAGPCTITSTYHFMHLLSARSSMMXXYCXLLXDXXXVXXFXTXXXDXXXXXXXXXXXXXPXXXXTXXXXXXXXXXXXXXXXXXXMXXXXXXXXXXXXXXXXXXXPXXXXXXXXXXRXXXXXXXXXXXXXDXXXXXXXXXXXXXXXXXXXXXXXXXXXXPXXXXXXXXXXXXXXXXXXXXXXXXXXXXXXXXXXXXXXXXXXXXXXXXXXXXXXXXXXXXXXXPPLPPPPPPPPPPPPLFFFXFFFFFFFFFFFFFFFFFFPLSPPPPPPPPPPPPPPPPPFFFFFFFFFFFXFFFFFFFFFFLFPPPPPPPPPPPPPPPPPRPPPFFXFFFFFFFFFFFFFFFFFFFFFLLLPPPLPPPPPPPPPPPPPPXFXXXXFXFXFXXFXFXXFXFFXXFSPSSLSLLSLSLSLSLSLSLSLXXXXYIXFXXXFFXXFFXXIXXFSXFPFPFSLPLSPPLPLPPPPPPPPPXXFXXFXXXFLXXXFFFFFFFFFFFFFFFLLLLPFLPPPPPPSPLPPPPSIXXXXXXXXXXXFXXXXXXXXXXXXXXXXXXXXXXXXXSLXXSFRYPFXYFYFVFXFSFFPFFPFFPFFPLFSPFFFPLFFFPPLFFFFPPPPPPFFFFFFFFFIFFFPPFFFFFFPLFFFXLFISPX

SEQ ID NO: 2193 - DNA, 1297 bp, Homo sapiens
  source (1)..(1297)
  CDS (201)..(1097)
ttctctttttcttcttcttcttcttcttcttcttcttcttcttcttcttcttcttcttcttcttttttttttgagacagagtttcactcttgttgcccaggctagagggcaatggcgcgatctcggctcaccgcaccctccgcctcccaggttcaagcgattctcctgcctcagcctcctgattagctgggattacaggcatgggccaccgtgcctggctgatgtttgtacttttagtagagacggtgtttttccatgttggtcaggctggtctcccactcccaacctcaggtggtccgcctgccttagcctcccaaagtgctgggatgacaggcgtgagccaccgcgcccagcctctctctctctctctctctctctctctctctctctctctctcgctcgcttgcttgcttgctttcgtgctttcttgctttcccgttttcttgctttctttctttctttcgtttctttcatgcttgctttcttgcttgcttgcttgctttcgtgctttcttgctttcctgttttctttttctttctttctttctttctttctattgtttctttcttgcttgctttcttgcttgcttgcttgctttcgtgctttcttgctttcctgttttctttctttctttctttcttttgtttctttcttgcttgctttcttgcttgcttgctttcgtgctttcttgttttctcgctttctttctttcttttgtttctttcctgcttgctttcttgcttgattgctttcgtgctttcttgctttcttgttttctttctttcttttgtttctttctttcttgcttccttgttttcttgctttcttgcttgcttgctttcgtgctttcttgctttcttgctttctttcttttgtttctttcttgcttgctttcttgcttccttgttttcttgctttcttgcttgcttgctttcgtgctttcttgctttcttttctttctttcttttctttttctttctttctttctttcttgctttcttttctttcattcattccttctttcttttctttctttcttccttccttccttccttccttccttcctttctttctttctttctgtttcgtccttttgagacagagtttcactcttgtttccacggctagagtgcaatggcgcgatcttggctcaccgcaccttccgcctcccgggttcgagcgcttctcctgcctcagcctcccgattagcggggatgacagggaggcacccccacgcctggcttggctgatgtttgtgtttttagtaggcacgccgtgtctctccatgttgctcagg

SEQ ID NO: 2194 - protein, 298 aa, Homo sapiens
MGHRAWLMFVLLVETVFFHVGQAGLPLPTSGGPPALASQSAGMTGVSHRAQPLSLSLSLSLSLSLSLACLLAFVLSCFPVFLLSFFLSFLSCLLSCLLACFRAFLLSCFLFLSFFLSFYCFFLACFLACLLAFVLSCFPVFFLSFFLLFLSCLLSCLLAFVLSCFLAFFLSFVSFLLAFLLDCFRAFLLSCFLSFFCFFLSCFLVFLLSCLLAFVLSCFLAFFLLFLSCLLSCFLVFLLSCLLAFVLSCFLFFLSFLFLSFFLSCFLFFHSFLLSFLSFFLPSFLPSFLSFFLSVSSF

SEQ ID NO: 2195 - DNA, 1294 bp, Homo sapiens; identical to SEQ ID NO: 2149
  source (1)..(1294)
  CDS (201)..(1094)

SEQ ID NO: 2196 - protein, 297 aa, Homo sapiens; identical to SEQ ID NO: 2150

SEQ ID NO: 2197 - DNA, 1717 bp, Homo sapiens
  source (1)..(1717)
  CDS (201)..(1517)
  modified_base (1260): a, t, c, g, unknown or other
  modified_base (1355)..(1454): a, t, c, g, unknown or other
  modified_base (652): a, t, c, g, unknown or other
cagcagcaggtctgtcttcccagcgtggagggtgagtccagcacagcagcacccagagggtcccgcaggatcccagcccagtgcccggggagaggagggctgtcagctgtggcggggaggtccacagtccagtttcccgaaagcaaaggagtccctcaggctgggaagtttcgcatgactgctccttctcctattacctcatgctagccctccccactctaagaccctcacgccaggaccctccaccctcagaccctctcaccaggaccctccaccctcagaccctcacaccaggaccctccaccctcagaccctcacaccaggaccctccaccctcagaccctcacaccaggaccctcctccctcagactctcataccaggaccctcctccctcagactctcacaccgggaccctcctccctcagaccctcatgccaggaccctcctccctcagactctcacaccaggtcctttccaccttcagatcctcacctcaggacactgcatctacacaggacggcacccagccccatgtgacacatacagacatgctccccagactcagggaatgatccagagtgaccaagacgggcacaaggaagggcaaacagtcctgcctcgggaggagatcatgcatggaatcttccctantctttttctcccccacctctcttcccctctcttcttttacattcccttttattttctcttttccctttcccccttttttttttttttccctctctttttctcttctctctccatcccccaccccctttacctacttttttttttccccctctcctcctcccttcttctctttcttctttttttttttcttcactccctctttttctcctttttttttaacaaccattctccttccctccctcctctcccaccacctttctcaccttctttttttcttttttttttcttttcttttttttttttttattttttttttttttttcatttttctcctctcctttttatttttcttttctccttttttacccttatctcttcttattattctctctttcttttttctctttcctttttcttttttttttttcttttctcttctcttcttctctttcttttcctcttttcttttctcatcccccccttcttcttccttatcttctctctttctcctcttttctcttcttttatcctctttcttctttttcattcttctttcctttcttttttttttttttttttccctcttcatcctccctctcctttcctcnttttcctccttctctttctccttcttcctctcctattccttatcatctcttctccctcattttccttgtttttctctcttttcattttcttattnnnnnnnnnnnnnnnnnnnnnnnnnnnnnnnnnnnnnnnnnnnnnnnnnnnnnnnnnnnnnnnnnnnnnnnnnnnnnnnnnnnnnnnnnnnnnnnnnnnngcagactcttttcttccatttcacatctttctgaccaaagccggcgaaggtctgcgctgttaagaccccccccacacaccatcccggattatctcccgcctcacagcgtgggctcttaatcatacctgcaacgtttctgtgccatggcaggtgatacggccgtaggttctgggaatcagggcatggacatgtcagggtcagggctctgctgaccacgcggagcaagtaaaacatacacagctcgttgccacggctaaaactcc

SEQ ID NO: 2198 - protein, 438 aa, Homo sapiens
  MOD_RES (151): Variable amino acid
  MOD_RES (354): Variable amino acid
  MOD_RES (385)..(418): Variable amino acid
MLALPTLRPSRQDPPPSDPLTRTLHPQTLTPGPSTLRPSHQDPPPSDPHTRTLLPQTLIPGPSSLRLSHRDPPPSDPHARTLLPQTLTPGPFHLQILTSGHCIYTGRHPAPCDTYRHAPQTQGMIQSDQDGHKEGQTVLPREEIMHGIFPXLFLPHLSSPLFFYIPFYFLFSLSPFFFFFPLFFSSLSIPHPLYLLFFFPLSSSLLLFLLFFFLHSLFFSFFFNNHSPSLPPLPPPFSPSFFLFFFFSFFFFYFFFFFHFSPLLFIFLFSFFTLISSYYSLFLFSLSFFFFFFLFSSLLLFLFLFSFLIPPFFFLIFSLSPLFSSFILFLLFHSSFLSFFFFFFPLHPPSPFLXFLLLFLLLPLLFLIISSPSFSLFFSLFIFLXXXXXXXXXXXXXXXXXXXXXXXXXXXXXXXXXXADSFLPFHIFLTKAGEGLRC

SEQ ID NO: 2199 - DNA, 1249 bp, Homo sapiens
  source (1)..(1249)
  CDS (201)..(1049)
tacaacaattagccaggcatggtggcccgtacctgtagtccgagctactcaggaggctgatgcaggagaagcacttgaacctggggatcggaggttgcactgagctgagattgcaccactgcactccagcctgagtggcagagcaacactccatctcaaaaaataaaataaaatcaaaataaaaacacacttgaatatatatgtgtgtgtgtatatatatatgtatatgggatacatatataccccatatatatgtatatcccatatacgtataccccatatatatgtatatcccatatacgtatacccatatatatgtatatcccatatacgtataccccatatatatgtatatcccatatacgtataccccatatatatgtatatcccatatacgtataccccatatatatgtatatcccatatacgtataccccatatatatgtatatcccatatacgtataccccatatatatgtatatcccatatacgtataccccatatatatgtgtatcccatatacgtataccccatatatatgtatagcccatatacgtataccccatatatatgtatatcccatatacgtataccccatatatatgtatatcccatatacgtataccccatatatatgtatatcccatatacgtataccccatatatatgtatatcccatatacgtataccccatatatatgtatatcccatatacgtataccccatatatatgtatatcccatatacgtataccccatatatatgtatatcccatatacgtataccccatatatatgtatatcccatatacgtataccccatatatatgtatatcccatatacgtataccccatatatatgtatatcccatatacgtataccccatatatatgtatatcccatatacgtataccccatatatatgtatatcccatatacgtataccccatatatatgtatatcccatatacgtataccccatatacatatacgtatatcccatatacatatatgtatatcccatatatgtatatatacatatatataaacacacacacacaggatatatatatatatacacacacaggatatatatatatatacagacacaggatatttatatatacacacacaggatatatatatgggatatacgtatatgggtgatacatatatatgggatatacgtatatgggttatacatatatgggatacacgtatatgggttatacatatatatgggatact

SEQ ID NO: 2200 - protein, 282 aa, Homo sapiens [sequence omitted]

SEQ ID NO: 2201 - DNA, 6546 bp, Homo sapiens
  source (1)..(6546)
  CDS (201)..(341)
  CDS (5505)..(5936)
  CDS (6164)..(6346)
aacaaaaacgaagtaaagtgggagacgaaaaaagaaaactatttgtgaatggtttgaatgccatactaaagagttcagaattttaaagctaatccatgtctttttcttttaggattaaaataatgcagaatattggagttacatttattcaggctggtcagtattcagatgctattaattcatatgagcacataatgagcatggcaccaaatctgaaggcaggctacaacctaactatctgttattttgctattggagaccgagaaaaaatgaagaaggcattccaaaaattgattactgttccattagaaattgatgaagataaatatatttcaccaagtgtgagtatgaaaaagacatttctgtagccacttcccacttatctgtgcttttctgttttcagaatgagaaagccagaatagatgacttcttgggtttttcccaggcctgtatcaatgtgttttattattgatgtatttcattttttatttaaattgggttgagaatgagactctattgaaatggggtagagattatggttaaaacagactgcacaattttagtaaaaaaatcattaaaaataagattccatgtcattcattaagcataatatcttttttttttttttttttttgagacagagagcctgccttccaggctggagtgcagtggtgcagtctcagctcactgcaatctctgcctcccaggctctggcaattctcatgcctcagcctcctgagtagctgggattacaggcatgcgccaccatgcccggctaagttttttatttttagtagagaaggggttttgccatgttgcccaggctggtcttgaactcctggcctcatgtgatccacctgcctccactttccaaagtgctgggattacaggtatgagcctggccaagggtaatatcttgaccaagaaacctccaaatccttatttcacctattaagagccattgtggagcagagggaacctcaactgtgtataaatatctcaagagcgaaggctgggcgcagtggctcacacctgtaattccagcactttgggaggctgaggtgggcagattgcgaggtcagtagtttgagaccagcctgaccaacagggcgaaatgctgtctctaccgaaaatacaaaaattagctgggtatggtggtgggcgcctgtaatcccagctacttgggaggctgaggcaggagaattgcttgaacttgggaggtggaggttgcagtgagccaagattgtgccactgcactccatcctgggtgacagagcaagactctgtcttgaaaaaaaaaaagtgaaataaattccttatccttactcatagagtggaacataatgcagttatcaaaagtcatattttcaaacacctagagaaatattatataatgttaagtgaaaacatacagctatgcacacttatacatgaacataaactggaagaattgacaccaatataaaacagtagtttctgagctatgagattgtaaatgcttttgaaatattttccagatttttacaaataaaatattggcatactgtatattagtttaaggaaaattgcctctatttgtagataaaaatggtacattttcaatttcacagagttgaacttttaatagattttcttaacagattatattagctgggcatggtggcgggtgcctgtaatcccagttactagggaggctgaggcaggagaatcacttgaacccggaaggtggaggttgcaggagccgagatcgcactattcactccagcctgggtgacaagagcaaaactccatctcaaaaaaaaaaaaaaaaagattataagagtactgtagcatagcagagtataggctctgaagccagatgccttggctctcctactcagctcttactctccctgtgtctcagttcttttatatatgtaatgggattaactattataacctatcttacagggttaaggtgaggattataggtgaggattaaatgagttaatgcatgtgaaatgcttaaaatagtacctggcagctgggcacagtggctcacacctgtaatcccagcactttgggaggccgaggtgggaggattgcttgagcctgagagttcaagatcagcctgcgcaacatggcgaaactccatctctacaaaaaaatacgaaaattagccaggcttgatgttgcacacctgtagtcccagctacttgggaggctgaggtggaaggatcacctgagcccgaggaggtcaaggctgcagtgagccgtgatcacacccctgcacactagctttgggtgacagagtaagaccttgtctcaaaaaaaaaaaaaatagccagcctggtggtgtgcacctgtagtcccagctactttgaaggttgagggggaagatcatctaagcccggggaggtcaaggttttagtaagttgtgaatcacacatgcttctccagcctggatgacagagtgagaccttgtctcaaaagtaaaataccaaataaaaaaaatatatattagccaggcatggtggcacatgtctgtagtcccacctactcgagaagctgagtgggaagatggcttgagcccagaagttgagactgcagtgacccatgatcatgccacagtgctccagtctgggcaacagagcaagactctgtctcaaaacaaaactaaccaaacaaaaaaaatgtatgtgaaagatagttaagtgctgggcaaatgttaattattatatattattttcatattgagaaaaaataatatatgttgtaaaatcatctgtgtttttaatggggagtagagatatggatcatactaagtaattgatgattgaagcatttatatttgagtttagaattaaagtattacatatttgtactaacaaccccagcttctgtgtacttggtcctaatctttccatcctgatccttttatcagcttcttagaataggttagttcaatggagaatgtgattggtaatcagaaatatgaaaaagaaagttctaatttacataagggaaaatagaaggattaatttactctcccttttttaaaactaattagtagggaggcttattggaaattcaagttcgtggctggacatgatggcttatgcctatagtcccaatactttgaaaggctgaggtgagcaaattgcttgagccaaggaattgaagaccagcctgggcaaaatggtgaaacctcatctctacaaaaaatacaaaaattagccaggcatcatggcatgcccctgtagtcccagctacttgggaggctgaggtgggaggatcacctgagcccagggaggtggaggctgcagtgagccatgatcatgccactgcactgcagcctgggcaatagagtgaggctgtatctcaaaacaaaacaaaacaaaaattaagttcttgctgtttacttctgaattattctttttttcttccattttattttaccaggatgatcctcatactaacttagtaactgaagctataaaaaatgatcacctcagcaaatggaacgtgaaaggtaatattttaaacttaataacgtagttattaattacattatttaaaatatttaatgtttagtattaagatacttaatatttgaaacttaaaataatttagttttaatttttataaaagggttgaatgtgcattctgtttcttacagaacttgttatattcaatatatttcttgaatagtgctattatttcaccatttttatacttactggttctcttttctcattcagaataatctcagtgctcatgctaatctcaattactcaatctcagttattctgtcagttgtttccctctgcatttggtacattattggaactttgtttatcttacctttatttcaaaaatgacgtctttatgtttttttatcctgcctcacaattaaggatcagctctcagagacaaaattctatttatttcatttcttccttcctctaatatggtactacaacttgtttctacttacaacacttctgacaccaaatgtgtggtttttctcacaccaacaaccaattatccatctccctggacaccaagggcttagtcccacaagactactaccctgttcctcactacagatgccagttgtaagcctgtaagcctgggcctcctgaactcctgactgacctgctatgaatggaaggctcccactaccccctcctcagggtcagtagttttctaggagagctcacaaaactcaggaaaatactttatttgtacttaccacgttattataaaggatacaactcagagacaaccaaatggaagagctgcatagggcagaatatgggggaagtagtgcagagcctctgttgactttctgggtgcaccaccctcccagcacctccgtgtgttcatcaacctggaaactctctgaactgtgtcatttagggtttatatgtaggtttcatgatgtaggcatgatttttatcattggccattggtgattgaactcagtctgcagcctttctcccttcgctggagattgagggtggaattaaaagtacaactggggtggtgtcagaaaaggccaagtggggagctaagactttaacccctaaagcctgttccattcctctgatgtcagtggatgacacgtggggagcctggaattccacccctacccagcagtactgaagcatcccccaaccctttctccttgggtagtgtcagaggaggcttagtggagcgtcagggctttaactgtcacccagttgtaacaaagccctcctatcatgatgttagtaggacggactattttgggaagcaagaactcccaccctgcccaatagatacaaggacccctctgcctattctgggtgtcaaccggaggccatgtggcaggggctggatttccaccttcacctggcagtggcaaggtggagtgtctccttcctctgctggagtggtatccagaaagccagctaaaacgatacttaaaatccagggtctcataattcagaaatgtccaagtgttcattaagaatcattgtttgctgggcacggtggctcacgcctgtagtcccagcactttgggaggctgagccgggtagataacctgaggtcaaaagttcgagaccagcctgaccaatatggtgaaacctcatctttactaaaaatacaaaaattagccaggcatggtggcatgtgcatgtagtcccagctactcaagaggctgggacaggagaattgcttgaacccaggaggcggaggttgcagtgagtgctaagatagtgctactgcactccaggctgggtgacagagcaggactccatctcaaaaaataaaataaataaataaataaaatagtgtgaatagccctataaatcttaaggacattgaatgatgcttttaaaactctgaaaaaagaaacctatctctaggcccagatgggttttactggagaattctattaagaatttatatcaggggcaggaaggggcagccacttgggcaggatggcggcggctacagtgggcaatgtggtcaactaggtgatcctgagtgccttcctgttcccggtgactgtgtccttgtgccacatcctggtactgtacgtggggctcctgctgctgctgcacgcctggcgcttgccccctgcaccgcccatctcaggccccgggcccagtctgcattcgtcccctggcctgctgctgccgcagcacttctacccgtactgcgtgctgccactcaccttcggcaagtacttcgcatccctgtcagtgcacgtcagcttctggaaggtgcccatgtcctatgcacacaccattaaggccaccatgcccatttgggtggtcctcctgtcccagatcattataaagaagcagagcaacaaggtgtacttgtcactcatccccatcatcagcggcgtcctgatggccacggtcaccaagttgtcttttgacatgtggggaggccgccacgctgtgcttcttgtttcagaacattttctccaaaaagatcttgagagatttgcggatccaccatctcccgctgctcaacatcttgggctgccacgctgtttttttatgatccccacctgggttctggtggacctctcagctttcctggtcagcagcgacttgactacgtctcacagtggccctggatgctcctgcttctggctgtcagcggcttctgtaactttgcctagaatgtcattgccttcagcatcctcaacctcgtcagctctctgagctattcagttgtcaatgccaccaagagaatcatggtcatcacagtgtccctgatcatgctgcccaacccagtcaccagcaccaatgtcctgggcataatgactgccatcctcggggtcttcctctacaagaccaagtaagatgcaaaccagcaagtcaggaagcacctcctcctggcaccacagtggacctgagcagcaaggaacatcacccagagcccactggagaagccccaccaatggcctcctcttcccccagcacggggactatcatggctgcaacaatatcttaacagacacttccagtacagctggcagagctacccaactcttagtttgaa

SEQ ID NO: 2202 - protein, 251 aa, Homo sapiens
MAPNLKAGYNLTICYFAIGDREKMKKAFQKLITVPLEIDEDKYISPSVILSAFLFPVTVSLCHILVLYVGLLLLLHAWRLPPAPPISGPGPSLHSSPGLLLPQHFYPYCVLPLTFGKYFASLSVHVSFWKVPMSYAHTIKATMPIWVVLLSQIIIKKQSNKVYLSLIPIISGVLMATVTKLSFDMWGGRHANVIAFSILNLVSSLSYSVVNATKRIMVITVSLIMLPNPVTSTNVLGIMTAILGVFLYKTK

SEQ ID NO: 2203 - DNA, 1714 bp, Homo sapiens
  source (1)..(1714)
  CDS (201)..(1514)
ttcttaccagaaaccaaatctgcctttatcttggacttcccagcctccagaactgtgggaaataatttctgttgcttataagctactcagtttatggtattttgttacagcagtccaaatgaactaagataccaccatgtatacatacacatatacacactatatatgtgtgtatatacacacacatatacacactatatatgtgtgtatatacacacacatatacacactatatatgtgtgtacacacacacacacacactatatatgtgtgtacacacacacacacatacacactatatatgtgtgtacacacacacacacatacacactatatatgtgtgtacacacacacatatacacactatatatgtgtgtacacacacacacatatacacactatatatgtgtgtacacacacacacatatacacactatatatgtgtgtacacacacacacatatacacactatatatgtgtgtacacacacacacatatacacactatatatgtgtgtacacacacacacatatacacactatatatgtgtgtacacacacacacatacacactatatatgtgtgtacacacacacacatacacactatatatgtgtgtatacacacacacatatacacactatatatgtgtgtatacacacacatatacacactatatatgtgtgtatacacacacatatacacactatatatgtgtgtattcacacatatacacactatatatgtgtgtgtatacacacatatacacactatatatgtgtgtatacacacatatacacactatatatgtgtgtatatacacacacatatacacactatatatgtgtatacacacacatatacgcactatatatgtgtgtatacacacacatatacgcactatatatgtgtgtatacacacacatatacgcactatatatgtgtgtatatacacacacatatacgcactatatatgtgtgtgtatatacacacacatatatgcactatatatgtgtgtgtatatacacacacataaatacactatatatgtgtgtgtatatacacacatatatacactatatatgtgtgtgtatacacacatatatacactatgtgtgtgtacacatacatatatacactgtgtgtgtacactcacatatatacactgtgtgtgtacatatatacactatgtgtgtgtacactcacatatatacactgtgtgtgtacatatatacactgtgtgtacactcacatatatacactgtgtgtgtacacacatatacactgtgtgtacacacatatatacactgtgtacacacacatatatacactatgtacacacacatatatacactgtgtacacacacacacgcactgtgtgtgtgtacacgcacacacgcactgtgtgtgtgtacacgcacacacgcactgtgtgtgtgtatatacgtatatacaccatatatgtgcgtatatacgtatatagtgtgtgtacatatgtatatatacacatatagtgtgtgtatatatgactttgatatatatttctatatgtcttagacatatatagatatacacatatatctatatatagacatacacatatacgtatatatagacatatatgatattggtcttttaaaatctggctataaaacttttcccagacatactcctctattcagtgggaaccacctactctatataaaattctagg

SEQ ID NO: 2204 - protein, 437 aa, Homo sapiens
MCVYTHTYTHYICVYTHTHTLYMCVHTHTHTHYICVYTHTHIHTIYVCTHTHIHTIYVCTHTHIYTLYMCVHTHTYTHYICVYTHTHIHTIYVCTHTHIYTLYMCVHTHTYTHYICVYTHTHTHYICVYTHTHTHYICVYTHTHIHTIYVCIHTHIHTIYVCIHTHIHTIYVCIHTYTHYICVCIHTYTHYICVYTHIYTLYMCVYTHTYTHYICVYTHIYALYMCVYTHIYALYMCVYTHIYALYMCVYTHTYTHYICVCIYTHIYALYMCVYIHTHKYTIYVCVYTHIYTLYMCVYTHIYTLCVCTHTYIHCVCTLTYIHCVCTYIHYVCVHSHIYTVCVHIYTVCTLTYIHCVCTHIYTVCTHIYTLCTHTYIHYVHTHIYTVYTHTRTVCVYTHTRTVCVYTHTRTVCVYIRIYTIYVRIYVYSVCTYVYIHI

SEQ ID NO: 2205 - DNA, 1447 bp, Homo sapiens
  source (1)..(1447)
  CDS (201)..(1247)
gagtttaaggctgcaatgagctatgatcatgccactacaccgtagcctgggcaacagagtgagacttcatctcgaaaaaattgaaacactaacaaataaataaataaaataaatttaataggaccttcaggtataactataatttgaaccacagtatagattaagtccatgaagatttgttaatcggtgcattttagcaaatgctaaagttaacttacagcctattttgtttagaggcacaaaagccagtcagtgcccttttaatccttttatgtgaatccttttggtatatgcattttgtcatatatttgttatatatatcatttgtcatatacatttttacatacacattttggatttctaattgggttgaattatggacacttgttttaatttatataatacataatctatttattgtatattttataagtatatttatatatataatttattggctcctcttttctccctctcctatatctagggtgtttttgtccttcttctccacccccttttgttcccttttaggcttttggccacctcaagtttttgggttttgtctcaggctgataagaggaagtggtggcggcaggggtatgtgttgggggtgggtgtgggtgtgtgttgggggcaggggtgtgtgtgtgttgagggcaggggtgtgtgtgtgttgggggcaggggtgtgtgtgtgttgggggcaagggtgtgtgtgtgttgagggcaggggtgtgtgtgttagtgcaggggtgtgtgggtgtgggcatgtgttgggtgtgtgtgttgagggttgggggtgtgcgtgtgttggggtgtgtgtgttgggggcaggggtgcatgtgtgttggggtgggtgtgggtgtgtgttgggtgtgtgtgttgagggttggggggtgtgtgtgttgggcaggtgtgtgttggggcgggtgtgtgtgtgtgggggcgtgtgtgtgtgtgttgggggcctgtgggggggcggggtgtgtgttggggatgtgtgtgtgttgggggtgtgtgtgtgttggggtgtgtgtgtgtgtgtgtgttgggggcctgtcgggggtggggtgtgtgttgggggtgtgtgtatgtgttgggggtgtgtgtgtgttggggcgggtgtgtgtgttggagcgggtgggggtgtgggcgcgggtgtgtgtgtgggggggactgccctgtctgcagccagtgtttgcctccccctttcctttttctttttgttctttttttttgtttttttgagacggagtctcgctctgtcacccaggctggcgcgcagtggcgcgatctcggctcactgcaacctctgcctcccgggttcacgccattctcctaactcagtagctgggaccacaggcgcccgccaccacgcccagctaattttttgtatttttagtagagacggggttttcaccgtgttagccaggatggtcttgatctcc

SEQ ID NO: 2206 - protein, 348 aa, Homo sapiens
MLKLTYSLFCLEAQKPVSALLILLCESFWYMHFVIYLLYISFVIYIFTYTFWISNWVELWTLVLIYIIHNLFIVYFISIFIYIIYWLLFSPSPISRVFLSFFSTPFCSLLGFWPPQVFGFCLRLIRGSGGGRGMCWGWVWVCVGGRGVCVLRAGVCVCWGQGCVCVGGKGVCVLRAGVCVLVQGCVGVGMCWVCVLRVGGVRVLGCVCWGQGCMCVGVGVGVCWVCVLRVGGCVCWAGVCWGGCVCVGACVCVLGACGGAGCVLGMCVCWGCVCVGVCVCVCVGGLSGVGCVLGVCVCVGGVCVLGRVCVLERVGVWARVCVWGGLPCLQPVFASPFPFSFCSFFLFF

SEQ ID NO: 2207 - DNA, 1345 bp, Homo sapiens
  source (1)..(1345)
  CDS (201)..(1145)
aaggacacttgtcacaatttgtatgtattgatcatttgtaagttgggactaagacttttctgtggtgtgtgtgtgtggttttttttttggaagggagtgtgttgttattctgtgttgctttgctttttcttaaaagatcctcttctatatatttcgtgtgatttaaatgttctttttttttatataggtttgtggtaaatatgccagctctagaacacatgaatcagattttacacatcttgtttgtatttttaccctttctgtgggcacttgggactctgcccccacccgatgcacttctcttatgggcaatggagcaggttttagagttcggccttggaggctcatctatgtcaacccacttacggtatttatttttaaatattgatgttatatgtaatattcttaaagaacatttttcttttcaagtaaatatttttttctttttttttctgtacaggttattagtaatgttcatcatgtctgctggaacagctatagcatcatatttcattccaagcactgttggtgtggttcttttcatgactggatttggtttcttgctgagtctgaacttaagtgatatgggtcacaaaattggaaccaaatctaaggatttacccagtggtccagaaaaacatttttcatggaaggaatgccttttctacatcattatattagtcttggctcttttagaaactagtttgcttcatcactttgctggcttctcacagatttctaaaagcaattcccaggctattgtgggctatggtttgatgatattacttataatactgtggatacttagagaaattcaaagcatatatatcattggaattttccgaaatcccttttatccgaaggatgtgcaaactgtgactgtattctttgagaagcaaactaggctcatgaagattggtattgtcagacggattttgctaactttaggtaggaagataaagtctattaaccttgtgttacaaatcatatcctggaagtattcaaaaatattactcaattcccatatttgtgtggtattataccatatacaagtgtttgttcttttatgttatggttttttgtttattggctttttagttcatcgcttaaatgtgctcataaaaaatgtgtatttgccagaataaaatatggtagaaggagctattttgccttaattaaatttctctctttttgttttgttttagtatcaccttttgccatgatagcatttctttcattggacagttccttacaagggctccactcagtgtctgtctgtattggattcacaagagcctttagaatggtaatcctaatatgtgtttaatagtattttcctattgct

SEQ ID NO: 2208 - protein, 314 aa, Homo sapiens [sequence omitted]

SEQ ID NO: 2209 - DNA, 1180 bp, Homo sapiens
  source (1)..(1180)
  CDS (201)..(980)
  modified_base (999)..(1098): a, t, c, g, unknown or other
cttataatcatggtggaaggcgaaggggaagcaaggaccttcttcacatggtggcaggagagaagagtgaaggaagaacttccaaacacttattaaaacatcatgtctcgtgagaactcactcacgatcatgataacagcatgggggaaccaccctcataatccaaccacccccctctctcgacacgtggggagtatagcatgaggattataattcaagatgagagttgggtggggacacagatccaaaccatatcaacacagaagagattgtttttgtttgcctctctccccccctcctgttcttttctttcttggttctcgcccttgctcgctctccccctccgttctgttccctcctcccccctccctcccgccccccctcctcgtttggtgctgtttttgttccttgctcttctccttttttcccgcctgtttgcccggggcgtgttggcgcctcttgctcccccctcccgccccgcggttgtgtttgttttttttctgctgtgtttttttctgcggccccccccgcgtcttccccgcccgcccctgcccctccctctctctctgttcgtcctgctctttccgccgtcctctgtcgtcgtgccgccgtcgcccttccccgcttccgctctctccccccggctctccccgtctgtggtcctctctctcttccctccgccccctcgccgtttccgttcttcgctcctcccccctcttcctttcccttccttccctctctgctcctctcctgtccgtcggtctcccctctttcgttccgtcctttctgcttttcccccgctctcctcgctctctttctcccctgcctctctcttctccttgcgtcctttcgtccctcttttgcctcttcgtttctctcgttttgtcccgtccgtccctcgtccctccgtttcttctccccctctcctcctctccgtccttcttccgtcttcccttcctctccctcttccctgctgctaaccgacagactacaacaaannnnnnnnnnnnnnnnnnnnnnnnnnnnnnnnnnnnnnnnnnnnnnnnnnnnnnnnnnnnnnnnnnnnnnnnnnnnnnnnnnnnnnnnnnnnnnnnnnnnggggggggtcgtaggagtggtggtgggaagacgaaatgagcgagaaaagaccataagaccacaggccgggataagagcaact

SEQ ID NO: 2210 - protein, 259 aa, Homo sapiens
MRIIIQDESWVGTQIQTISTQKRLFLFASLPPSCSFLSWFSPLLALPLRSVPSSPLPPAPPPRLVLFLFLALLLFSRLFARGVLAPLAPPSRPAVVFVFFLLCFFLRPPPRLPRPPLPLPLSLFVLLFPPSSVVVPPSPFPASALSPRLSPSVVLSLFPPPPRRFRSSLLPPLPFPSFPLCSSPVRRSPLFRSVLSAFPPLSSLSFSPASLFSLRPFVPLLPLRFSRFVPSVPRPSVSSPPLLLSVLLPSSLPLPLPCC

SEQ ID NO: 2211 - DNA, 1441 bp, Homo sapiens
  source (1)..(1441)
  CDS (201)..(1241)
gtatatatacatgtgtatacatatgtgtatataaatatatacacatatgtatgtgtatatatgtgtgtatataaatatatacacatatgtgtatacacgtgtatataaatatatacacatatgtatgtgtatacacgtgtatataaacatatacacatacgtatgtgtatacacgtgtatataaacatatacacatatgcatgtgtatacatgtgtatataaacatatacacatatgtatgtgtatacatatgtgtgcataaatatatacacatatgtatgtgtatacatatgtgtgcaatatatacacatacgtatgtgtatacatatgtgtgcataaatatatacacatatgtatgtgtatacatatgtgtgtgtaaatatatacacatatatgtatgtgtacacatatgtgtaaatatatacacatatgtatgtgtatacatatatgtgtacataaatatatacacatatgtatgtgtatacatatatgtgtacataaatatatacatatgtgtatacatatatgtatatacgcatatgtgtatatacatatatatgttcataaatatatacacatatgcatgtgtatacatatatgtatacacatatgtatgtgtatacatatatgtgtatatacgcatatgtatgtgtatacatatatgtgtatatatacgcatatgtgtatctatatatatgtatatacgcataggcgtatatacacatatgcgtgtatacatacatatacaaatatacgcatacgtatgtatgtacatacgcatatacgcatacgtatgcacgcatacgtatgtgtgtacatacgcatatacgcatacatatgtacgcatacgtatgtgtgtacatacgcatatacgcatacgcatgtacgcatacgtatgtatgtacatacgcatatacgcatacgtatgtatgtacatacgcatatacgcatacgtatgtatgtacatacgcatatacgcatacgtatgtatgtacatacgcatatacgcatacgtatgtatgtacatacgcatatacgcatacgtatgtacgcatacgtatgtatgtatatatgcatatacgcatacgtatgtacgcatacgtatgtatgtatatacgcatatacgcatgtgtatgtacgcatacgtatgtatatacgtatatacgcatacgtatatacgcatacgtacatacgtacgtatgtatatacacacacgtatatacatatatccacacccgtagatacatatatacacacccgtagatacacatatacacgtatatgtgtagatacacatatacacgtgtatgtgtagatacacatatacacgtgtatgtgtagatacacatatacacgtgtatgtgtagatacacatatacacgtgtatgtgtagatacacatatacacgtgtatatgtgtatctacatatacacgtgtatat

SEQ ID NO: 2212 - protein, 346 aa, Homo sapiens
MCIHVYINIYTYVCVYICVHKYIHICMCIHMCAIYTHTYVYTYVCINIYTYVCVYICVCKYIHIYVCVHICVNIYTYVCVYIYVYINIYTYVCVYIYVYINIYICVYIYVYTHMCIYIYMFINIYTYACVYIYVYTYVCVYIYVYIRICMCIHICVYIRICVSIYMYIRIGVYTHMRVYIHIQIYAYVCMYIRIYAYVCTHTYVCTYAYTHTYVRIRMCVHTHIRIRMYAYVCMYIRIYAYVCMYIRIYAYVCMYIRIYAYVCMYIRIYAYVCMYIRIYAYVCTHTYVCIYAYTHTYVRIRMYVYTHIRMCMYAYVCIYVYTHTYIRIRTYVRMYIHTRIYIYPHP

SEQ ID NO: 2213 - DNA, 1276 bp, Homo sapiens
  source (1)..(1276)
  CDS (201)..(1076)
acaggataaagttttactttgctggttacatttgctcctttatgcctgttctacagagactcaccatggtgagcaaaactattcaactatctttaaaataatacctgaaaagtctcttgagggaagcgtgcccctatgcttctgaatagcatctttgtaagaagacaggtttcccttcatgccccacgttgtgtacttggatgctttttatacttttcccactatactgtgcgctgggcttgctgggacattcttcccgttttcccaccatgccatgcgtgctggggcgttcttcacgttttcccatcatgtcttgcatgctgggaggttctttccgtgttctcaccatgccgggcatgctggggcgttcttcaggctttcctgccatactgtgcttgctgggacattataattatgttttcccaccatgccttgcatgctgggggcatttttacgttttcccaccatgccgtgcttgctgggagttcttcagcctttccctgccgtactgtgcatgctgggacgttctttacgttttcccatcatgccgtgggtgctgccacgttcttcctgttttcccaccatcccatgtgtgcagggacgtttttcacgttttcccaccatgccatacgtactggggtattcttcaggctttccctgccatactgtgcatgctgggatgttctttatgttttcccaacattctgtgtgtgctgggatgtttttcacgttttcccagcatgcgttcttcaggctttccctgccgtactgcgtatgctgggacattcttaatgttttcccaccatgccgtgtgtgctggggcgttcttcaggctttccctgccatactgtgcatgctgggacattcttcatgttttcccatcatgctgtgcgtgctgggacattctttacattttcccaccgtgctgtgtgtgctgggaccttcttcatattttcccaccatgccgtgcctgctggggcgtttttcctgcgttcctgccatgctgcatgtgctgtgaagttctttggcttctcctccactactgcttttcccccactcccttgggtgttaattgagacagtgtctctctcttgtgggccctgctctgcctctctggccccctctgaatttcctttatggggttttttttttggtttgttggtttccacacacctatttaatatctgtgggctcaggggtcttcgtttttgacctttttctcctctcagatcagcactggctagcaaagctcatcccctccgtggcttgctccgtt

SEQ ID NO: 2214 - protein, 291 aa, Homo sapiens
MLFILFPLYCALGLLGHSSRFPTMPCVLGRSSRFPIMSCMLGGSFRVLTMPGMLGRSSGFPAILCLLGHYNYVFPPCLACWGHFYVFPPCRACWEFFSLSLPYCACWDVLYVFPSCRGCCHVLPVFPPSHVCRDVFHVFPPCHTYWGILQAFPAILCMLGCSLCFPNILCVLGCFSRFPSMRSSGFPCRTAYAGTFLMFSHHAVCAGAFFRLSLPYCACWDILHVFPSCCACWDILYIFPPCCVCWDLLHIFPPCRACWGVFPAFLPCCMCCEVLWLLLHYCFSPTPLGVN

SEQ ID NO: 2215 - DNA, 1657 bp, Homo sapiens
  source (1)..(1657)
  CDS (201)..(1457)
  modified_base (3)..(6): a, t, c, g, unknown or other
  modified_base (9): a, t, c, g, unknown or other
  modified_base (11): a, t, c, g, unknown or other
  modified_base (14): a, t, c, g, unknown or other
  modified_base (16): a, t, c, g, unknown or other
  modified_base (18): a, t, c, g, unknown or other
  modified_base (34): a, t, c, g, unknown or other
  modified_base (37): a, t, c, g, unknown or other
  modified_base (40): a, t, c, g, unknown or other
  modified_base (45)..(46): a, t, c, g, unknown or other
  modified_base (51)..(53): a, t, c, g, unknown or other
  modified_base (62)..(63): a, t, c, g, unknown or other
  modified_base (72)..(73): a, t, c, g, unknown or other
  modified_base (76)..(77): a, t, c, g, unknown or other
  modified_base (79): a, t, c, g, unknown or other
  modified_base (86)..(87): a, t, c, g, unknown or other
  modified_base (92): a, t, c, g, unknown or other
  modified_base (100): a, t, c, g, unknown or other
  modified_base (102): a, t, c, g, unknown or other
  modified_base (115): a, t, c, g, unknown or other
  modified_base (118): a, t, c, g, unknown or other
  modified_base (124): a, t, c, g, unknown or other
  modified_base (129): a, t, c, g, unknown or other
  modified_base (136)..(137): a, t, c, g, unknown or other
  modified_base (142)..(144): a, t, c, g, unknown or other
  modified_base (150)..(152): a, t, c, g, unknown or other
  modified_base (157): a, t, c, g, unknown or other
  modified_base (161)..(163): a, t, c, g, unknown or other
  modified_base (168)..(172): a, t, c, g, unknown or other
  modified_base (174): a, t, c, g, unknown or other
  modified_base (176): a, t, c, g, unknown or other
  modified_base (179)..(180): a, t, c, g, unknown or other
  modified_base (186): a, t, c, g, unknown or other
  modified_base (189): a, t, c, g, unknown or other
  modified_base (193): a, t, c, g, unknown or other
  modified_base (206): a, t, c, g, unknown or other
  modified_base (214): a, t, c, g, unknown or other
  modified_base (217)..(218): a, t, c, g, unknown or other
  modified_base (223)..(226): a, t, c, g, unknown or other
  modified_base (241)..(242): a, t, c, g, unknown or other
  modified_base (255)..(354): a, t, c, g, unknown or other
  modified_base (393): a, t, c, g, unknown or other
  modified_base (434): a, t, c, g, unknown or other
  modified_base (473): a, t, c, g, unknown or other
  modified_base (584): a, t, c, g, unknown or other
  modified_base (799): a, t, c, g, unknown or other
  modified_base (1064): a, t, c, g, unknown or other
  modified_base (1079): a, t, c, g, unknown or other
  modified_base (1129): a, t, c, g, unknown or other
  modified_base (1183): a, t, c, g, unknown or other
  modified_base (1195): a, t, c, g, unknown or other
  modified_base (1208)..(1209): a, t, c, g, unknown or other
  modified_base (1234): a, t, c, g, unknown or other
  modified_base (1254): a, t, c, g, unknown or other
  modified_base (1258): a, t, c, g, unknown or other
  modified_base (1264): a, t, c, g, unknown or other
  modified_base (1275): a, t, c, g, unknown or other
  modified_base (1284): a, t, c, g, unknown or other
  modified_base (1297): a, t, c, g, unknown or other
  modified_base (1319): a, t, c, g, unknown or other
  modified_base (1332): a, t, c, g, unknown or other
  modified_base (1349): a, t, c, g, unknown or other
  modified_base (1374): a, t, c, g, unknown or other
  modified_base (1405): a, t, c, g, unknown or other
  modified_base (1409): a, t, c, g, unknown or other
  modified_base (1426)..(1428): a, t, c, g, unknown or other
  modified_base (1432): a, t, c, g, unknown or other
  modified_base (1435): a, t, c, g, unknown or other
  modified_base (1438)..(1440): a, t, c, g, unknown or other
  modified_base (1447): a, t, c, g, unknown or other
  modified_base (1453): a, t, c, g, unknown or other
  modified_base (1458): a, t, c, g, unknown or other
  modified_base (1480): a, t, c, g, unknown or other
  modified_base (1482)..(1483): a, t, c, g, unknown or other
  modified_base (1508)..(1607): a, t, c, g, unknown or other
  modified_base (1618)..(1619): a, t, c, g, unknown or other
  modified_base (1624): a, t, c, g, unknown or other
  modified_base (1628): a, t, c, g, unknown or other
tcnnnnttntntcncntncccttttctttccctnttnctntcctnnctttnnnnttcccttnnttcccttcnnccnntncttcttnnttttntttccccntncctcgggcttctnccntttctnccccnttttttnntctcnnnttctcnnnccccnttcnnnctctnnnnntncncgnnttttcnaanggtntcaagcaatgggnctcagctnttnnccccnnnnccccctccccccgannctcttcttttttnnnnnnnnnnnnnnnnnnnnnnnnnnnnnnnnnnnnnnnnnnnnnnnnnnnnnnnnnnnnnnnnnnnnnnnnnnnnnnnnnnnnnnnnnnnnnnnnnnnngggttttgctggcttttgcctgcttcttccgtttttccncttttttgccgccttctcccggggtcctttgtcttcccggntggggtcccccttcgtggttcgcgctgtgggcgggttcncccctttgtgggtgtccggcggtttttttcctccttggtgtgtcccctttgccgtttttgctcccccttgtttttccttgcctttgcctttctgttgtttgggggttttcngggggcccctttcttttccgggggttttcggtgtttgtcgcgtgttttcccttttgccgccttccgggttccggtttggcgttccccgctttgtctttttgcgggtttcccgcggtgcttgcccttccccgttcggggtgcgtctctccgggtgttggctgggtttccgggtctggcttttccttttccggcctccggtgccgtttgttctgggngtgccgcccttttcggtgtgcgttccggctccgttgcgtttggtggtcgttccgcttccggcgcccttcgcctttctggctgccccttggttgggccgggcgttcggtgcgggcctcttcggttttccgcctgctggcgttcgggggctgtgctgcccggcgcttttgttgggtttcgcctgggttttccctgtctcgccgttgttttccgtcggcctgtgccccgcttgcttgcctgctggtcctgcttctccttgctgtgggntccgctcttctgccnttcgcctggttcttttctcgttctctttgttcggttcttttttgttggcnccgtgcctctctctgtccccccggctggttgtgccgttgtgtgttctcggctcnctgccgcctcgncctcctgtgcccnngcgttcctcccccctctgcctcccntgttggtgggtttcctgttntgcncttccncgccttgctcntttctcttngtttttgtagcgncgggctctccctcggttgctcnggctggtcttgcnctcctgggctccggtgntcctcccgcctgggccttccttgtngctggttctccttttgctctccccctccccngctntttttcctttttttggnnngttnctnagnnnttttgcntatgcnatagncggtacgaaaggggtcaagcantnnacaaccgcccgctgcccgcctttcnnnnnnnnnnnnnnnnnnnnnnnnnnnnnnnnnnnnnnnnnnnnnnnnnnnnnnnnnnnnnnnnnnnnnnnnnnnnnnnnnnnnnnnnnnnnnnnnnnnncttttttttcnnttttncttnccctttttccttctttttcccccccttcc

SEQ ID NO: 2216 - protein, 418 aa, Homo sapiens
  MOD_RES (2): Variable amino acid
  MOD_RES (5)..(6): Variable amino acid
  MOD_RES (8)..(9): Variable amino acid
  MOD_RES (14): Variable amino acid
  MOD_RES (19)..(52): Variable amino acid
  MOD_RES (65): Variable amino acid
  MOD_RES (78): Variable amino acid
  MOD_RES (91): Variable amino acid
  MOD_RES (128): Variable amino acid
  MOD_RES (200): Variable amino acid
  MOD_RES (288): Variable amino acid
  MOD_RES (293): Variable amino acid
  MOD_RES (310): Variable amino acid
  MOD_RES (328): Variable amino acid
  MOD_RES (332): Variable amino acid
  MOD_RES (336)..(337): Variable amino acid
  MOD_RES (345): Variable amino acid
  MOD_RES (352)..(353): Variable amino acid
  MOD_RES (355): Variable amino acid
  MOD_RES (359): Variable amino acid
  MOD_RES (362): Variable amino acid
  MOD_RES (366): Variable amino acid
  MOD_RES (373): Variable amino acid
  MOD_RES (378): Variable amino acid
  MOD_RES (383): Variable amino acid
  MOD_RES (392): Variable amino acid
  MOD_RES (402)..(403): Variable amino acid
  MOD_RES (409)..(414): Variable amino acid
  MOD_RES (416): Variable amino acid
  MOD_RES (418): Variable amino acid
MXLSXXPXXPLPPXLFFFXXXXXXXXXXXXXXXXXXXXXXXXXXXXXXXXXXVLLAFACFFRFSXFLPPSPGVLCLPXWGPPSWFALWAGXPLCGCPAVFFLLGVSPLPFLLPLVFPCLCLSVVWGFXGGPFLFRGFSVFVACFPFCRLPGSGLAFPALSFCGFPAVLALPRSGCVSPGVGWVSGSGFSFSGLRCRLFWXCRPFRCAFRLRCVWWSFRFRRPSPFWLPLGWAGRSVRASSVFRLLAFGGCAARRFCWVSPGFSLSRRCFPSACAPLACLLVLLLLAVXSALLXFAWFFSRSLCSVLFCWXRASLCPPGWLCRCVFSAXCRLXLLCXXVPPPSASXVGGFPVXXFXALLXSLXFCSXGLSLGCXGWSCXPGLRXSSRLGLPCXWFSFCSPPPXXFFLFLXXXXXXLXMX

SEQ ID NO: 2217 - DNA, 1285 bp, Homo sapiens
  source (1)..(1285)
  CDS (201)..(1085)
  modified_base (866)..(965): a, t, c, g, unknown or other
agcaggagctaagggcttcttgttatcattgtcatttttaccatgatatagacaagcaagccaaggtcagagaggttcgggggcctgcccaggactacacaggtggcagaggagccggaatgccagtttctaaaacagagaggcctcaactacatcacaatttcatcatctaacaaatacgttttgtgctgcctcagggcatgcccctgtgcacaatcctgcccccaccccaacagctcacatttatgggcacttgtcacctgccaagttattttctgatttcacagatggggaaactgaggctcagggatgttaaggggcttctcccagtgcacacagcagggaacatgtggcctgacacctcgaccttgatgtgcctaacgctgttaaatttcccggggtataatctcagagttaggtttattcatggtcatatcttcattacttttattttggttcttccttgtgttcctcgtttcgtcgtcgctcttctttcctcttgtcgttgtgtttcgtcttctttcttttgtttgttccccttctctctgttcttctcgtcttcttcttttgttcttcctctttgttcctttctcgtccttcttcgtcgtctttgtttctccctttcctttgtttcttctctctcttgtgtttgttattatcctcttgtgcgtctgtgcttttttctcctgtggtggtgttttcctgtcttttccgcttctgtgtgtttcgttcgtgttttgtcctcttctcctcttctttgtcttccgtttgctcttgtcttctttcgtttgttctgttctcttctcttcgccttctcttgtcattgtcctgcctcttgtctgctgatctctttcgtttggcgtttnnnnnnnnnnnnnnnnnnnnnnnnnnnnnnnnnnnnnnnnnnnnnnnnnnnnnnnnnnnnnnnnnnnnnnnnnnnnnnnnnnnnnnnnnnnnnnnnnnnncttatccggggtaagagacactgtctctgccccatcccctcccctcggtaccatcgctttaacctgacttgcaactacctgcacctgtatctattggcctgccggttttctatttgctgaggccttcatgggcaggtgagaaatgccagggaattagaactccattgcacaacccagcagcactcaagcagtgatggacaggagtgaatccttcccttaactgtcttagcccctccctggcctccacactcccttattcatgtgagatcacctcctaaataaacaacttgcactcaaatctccttctgggggaaccttaa

SEQ ID NO: 2218 - protein, 294 aa, Homo sapiens
  MOD_RES (222)..(255): Variable amino acid
MPLCTILPPPQQLTFMGTCHLPSYFLISQMGKLRLRDVKGLLPVHTAGNMWPDTSTLMCLTLLNFPGYNLRVRFIHGHIFITFILVLPCVPRFVVALLSSCRCVSSSFFCLFPFSLFFSSSSFVLPLCSFLVLLRRLCFSLSFVSSLSCVCYYPLVRLCFFLLWWCFPVFSASVCFVRVLSSSPLLCLPFALVFFRLFCSLLFAFSCHCPASCLLISFVWRXXXXXXXXXXXXXXXXXXXXXXXXXXXXXXXXXXLIRGKRHCLCPIPSPRYHRFNLTCNYLHLYLLACRFSIC

SEQ ID NO: 2219 - DNA, 1594 bp, Homo sapiens
  source (1)..(1594)
  CDS (201)..(1394)
  modified_base (800): a, t, c, g, unknown or other
  modified_base (1162): a, t, c, g, unknown or other
  modified_base (1221): a, t, c, g, unknown or other
  modified_base (1225)..(1227): a, t, c, g, unknown or other
  modified_base (1231): a, t, c, g, unknown or other
  modified_base (1243)..(1244): a, t, c, g, unknown or other
  modified_base (1256): a, t, c, g, unknown or other
  modified_base (1258): a, t, c, g, unknown or other
  modified_base (1260): a, t, c, g, unknown or other
  modified_base (1263)..(1264): a, t, c, g, unknown or other
  modified_base (1266): a, t, c, g, unknown or other
  modified_base (1292)..(1391): a, t, c, g, unknown or other
tacatacatcatcgatgactacgttcggttacaacgtttcacatcaatgttcacaattctagtcattatcgtccgtcgtacatgttttcttcacattctcgtcattgtcatgatgatatcattacatcttcatcgtatactcgtatcgtcattacatcatatgtcatatcgtcacatcatactgtctactgtttcgtcatatgtcttttctactcgcatctatttcgatctatcatcatcatatctcattgtatatctcaacatctctcgtgtatatcacatcattctctcatcactatatctgtcatctgtctcatatctcccatcatgtctctcatgactcgcgttcatcgcttatcatacgctcgtacatgtctcatattcatatctcatattcgtttatttatgtgactgtgtatcccatctcacatgtatgtacgtatctatgtctgtacatctatattcgtactatatacatgtattatctattcgcttacattatgtatattctgtatattctacatctaattaccctatgttgtcctattctctctctgctatactgtgtattgtattactgtttcttcattttttcttatttttttctatttattctctctttctttttctgtgctactcttctgtgctttcccttcctttcctcttcctctctttctcttcttcctcttttcctttcgtgctcttccttcttcttgtctctgttgtttccttccttcttttctctggtgtttcttgttctttctctttctgctcttccctccgttgttctttgtcttccntgttgtgtgttcgctctgttgttcgtcttccgttttcttctttcgcttcttcctgttttcgtcttctttgcttttcttctctttctcctcttctttcttctctgttcctccctttttcttttctttctccctcttcttttttcttcttccttggttcttctgtccttctcgctttttctcttctctcttctttttctttccttttcttcttcttttgctcttctttcctgttttctcctttttcttttttctcttttttttgtttccttcgtttctttcgtttctctcctctccttgtttccttcttcttctctttcctttttgttctttttttttgcggtgttctttggtgtgttcttgantggcctcttttatgccctccccctccttcctcgtgcctctcttgcgtcttccgcttatntgtnnngcgncggccagtgccnngcttgcatgccncnggtcntntanngntttaaaacgacggcagtgatnnnnnnnnnnnnnnnnnnnnnnnnnnnnnnnnnnnnnnnnnnnnnnnnnnnnnnnnnnnnnnnnnnnnnnnnnnnnnnnnnnnnnnnnnnnnnnnnnnnntgacttcttcctcctcatcccatttaccctccttcttctttccatatcccacttataccacccttcttatcatatcttatactctaaacctctttatctttcactataatcaccaccttcttatcaacctaccctacacatcctaatatacaacttctcccccacctactttatcatcctcattcctccatctttatcccatc

SEQ ID NO: 2220 - protein, 397 aa, Homo sapiens
  MOD_RES (200): Variable amino acid
  MOD_RES (321): Variable amino acid
  MOD_RES (341)..(344): Variable amino acid
  MOD_RES (348): Variable amino acid
  MOD_RES (352)..(353): Variable amino acid
  MOD_RES (355)..(357): Variable amino acid
  MOD_RES (364)..(397): Variable amino acid
MSFLLASISIYHHHISLYISTSLVYITSFSHHYICHLSHISHHVSHDSRSSLIIRSYMSHIHISYSFIYVTVYPISHVCTYLCLYIYIRTIYMYYLFAYIMYILYILHLITLCCPILSLLYCVLYYCFFIFSYFFLFILSFFFCATLLCFPFLSSSSLSLLPLFLSCSSFFLSLLFPSFFSLVFLVLSLSALPSVVLCLXCCVFALLFVFRFLLSLLPVFVFFAFLLFLLFFLLCSSLFLFFLPLLFSSSLVLLSFSLFLFSLLFLSFSSSFALLSCFLLFLFSLFFVSFVSFVSLLSLFPSSSLSFLFFFFAVFFGVFLXGLFYALPLLPRASLASSAYXXXXGQCXACMXXVXXXFKTTAVXXXXXXXXXXXXXXXXXXXXXXXXXXXXXXXXXX

SEQ ID NO: 2221 - DNA, 1561 bp, Homo sapiens
  source (1)..(1561)
  CDS (201)..(1361)
  modified_base (942)..(943): a, t, c, g, unknown or other
  modified_base (1062): a, t, c, g, unknown or other
  modified_base (1071): a, t, c, g, unknown or other
  modified_base (1076): a, t, c, g, unknown or other
  modified_base (1078): a, t, c, g, unknown or other
  modified_base (1080)..1081): a, t, c, g, unknown or other
  modified_base (1083): a, t, c, g, unknown or other
  modified_base (1090): a, t, c, g, unknown or other
  modified_base (1112): a, t, c, g, unknown or other
  modified_base (1135)..(1137): a, t, c, g, unknown or other
  modified_base (1169)..(1178): a, t, c, g, unknown or other
  modified_base (1180): a, t, c, g, unknown or other
  modified_base (1184): a, t, c, g, unknown or other
  modified_base (1186)..(1187): a, t, c, g, unknown or other
  modified_base (1190): a, t, c, g, unknown or other
  modified_base (1193)..(1194): a, t, c, g, unknown or other
  modified_base (1199): a, t, c, g, unknown or other
  modified_base (1252)..(1351): a, t, c, g, unknown or other
gtgtttcttctctccccgcttttctgcgctcgtttcggttccctcttcgggtttcctcttcccctcctctctctgtttggcctctgtcttctccccctgccccgtgggttgtttctttctgcccccgggcgttttccctttcgcgcccctcctggtctcctccctccctttctccagtcccccgtttgtgcctcttctgtatgtgcgctctctcggggctctttgcccttgcccccttctctattccgtgtttctgcttttttttcctcccgtctgccttgtgtttgctctcctttgcctcttcccttgtcttttggcccccctctgcttccgggttcgcccccttctggactcttttgggggtctggccggccggtcctccatccttgttcccttggccctttgtgttttcccttgcccgttctcctggcgtctgtcccccggccgtttgttttgtgcgtttcccgccggtcctgtcggtttcctgcccttttccgtcctcctgccgctttttgcggctccttggccgttgtgcgtttcccccccggtgtttgggttccctccagttgttcacgttcccctcctggggccctggccctctgggtaaccttgggtcgcctgctttcccgggtggcctgtgcttgtgcgcttgccctttctctccggtggcttgggtccttgcatcctttgcttgggcccctggggccttgtgttttgtggtgcctcctttcactggccttgacctggtgttcaggtttcggctttgtgctctatgccgtttctttccgcccttgtttgtccctttccttccgttgctggccggccgtttttgttccgtgcctgttctttttcgcccctatgccgcggtctcccatagtgtcctttggtgtgcccgcgccaggctttgtggtgtggcgtgggtgcgttctttttggtgtctgnngtctcggttctgtcgtttgtcctggcgccgcctcctgggtctctttgtttcttggttttctcctctgttctttggtttgtcttgcttgtttcttgggttcggtgtgggcccccccctcntgtgtcttncgttntntnngntcgccgntttttacggttgttctcaaaantttggctctcctccttctctctnnntccttttttctatattcctgtctccgaggatnnnnnnnnnncngaangnnagnaanntttgntgtttctcctttttcctccctgcgctctcactccttgcccttcctctccttcnnnnnnnnnnnnnnnnnnnnnnnnnnnnnnnnnnnnnnnnnnnnnnnnnnnnnnnnnnnnnnnnnnnnnnnnnnnnnnnnnnnnnnnnnnnnnnnnnnnnaggggggtagcacacagcacagggttgtaaagaaaaggtaaggggtggtccttacacttgacaggtcctttacagataacactgcaattaccgttaaaaaaaagatgtgggcagcgatccaccgagtgggcgtcctgcaggtaagttatacattgccccatcactgtcatgatcttgaaaaaaaaaaaaacactggcattgcgttgactg

SEQ ID NO: 2222 - protein, 386 aa, Homo sapiens
  MOD_RES (248): Variable amino acid
  MOD_RES (288): Variable amino acid
  MOD_RES (291)..(295): Variable amino acid
  MOD_RES (297): Variable amino acid
  MOD_RES (304): Variable amino acid
  MOD_RES (312)..(313): Variable amino acid
  MOD_RES (323)..(333): Variable amino acid
  MOD_RES (351)..(384): Variable amino acid
MCALSGLFALAPFSIPCFCFFFLPSALCLLSFASSLVFWPPSASGFAPFWTLLGVWPAGPPSLFPWPFVFSLARSPGVCPPAVCFVRFPPVLSVSCPFPSSCRFLRLLGRCAFPPRCLGSLQLFTFPSWGPGPLGNLGSPAFPGGLCLCACPFSPVAWVLASFAWAPGALCFVVPPFTGLDLVFRFRLCALCRFFPPLFVPFLPLLAGRFCSVPVLFRPYAAVSHSVLWCARARLCGVAWVRSFWCLXSRFCRLSWRRLLGLFVSWFSPLFFGLSCLFLGFGVGPPLXCLXXXXXAXFYGCSQXFGSPPSLXXLFSIFLSPRXXXXXXXXXXXCFSFFLPALSLLALPLLXXXXXXXXXXXXXXXXXXXXXXXXXXXXXXXXXXGG

SEQ ID NO: 2223 - DNA, 1360 bp, Homo sapiens
  source (1)..(1360)
  CDS (201)..(1160)
  modified_base (973)..(1072): a, t, c, g, unknown or other
ctcactgtctggcagctaatgtgaaaacaggggaaatatctctgtgaaaaatgattactttgtttgtatttaaaaaagagtaatccaggtgttcaggagaaacaatgttttttctggttttgtgatgtgaggaaaatgtcctctaccaagccttataaaaagaacgcttgtgtgaaagagtgaagattcaagagtgaagaatgtttgtttcttttttttttttttattatactttaagttttagggtacatgtgcacattgtgcaggttagttacatatgtatacatgtgccatgctggtgcgctacacccactaactcgtcatctagcattaggtatatcttccaatgctatccctccccccgccccccccaccacagtccccagagtgtgatattccccttcctgtgtccatgtgatctcattgttcaattcccacctatgagtgagaatatgccgtgtttggttttttgttcttgcgatagtttactgagaatgatgatttccaatttcatccatgtcccctacaaaggacatgaagtcatcatcttttatggctgcatagtattccatgatgtatatgtgcacattttcttaatccagtctatcattgctggacatttgggttggttccaagtctttgctattgtgcataatgtcgaattaacatacctgtgcatgtgtctttatagcatcatgctttacagctcttttggtagacatccacttatgcgatcgctggggcctatggtatttctagttctaccttcccaggcacgtcacactttccctcaccatggtcgcaccagtttctatttttactatcttgttctcgcgctctttgtgccccatttctttctactacttgtcgccttcctttttttttatcgcttgctctctatctggtttctgctgttttctcttagcgtgttccatttgtcttctcctgttccttttgtcgtgttctcctcttnnnnnnnnnnnnnnnnnnnnnnnnnnnnnnnnnnnnnnnnnnnnnnnnnnnnnnnnnnnnnnnnnnnnnnnnnnnnnnnnnnnnnnnnnnnnnnnnnnnncgcgtgtctggttataaataaaaaaggcgctgctcaatcccccatcaaaaggatgagggggattccccccgcgtcccccaaaaattaatccctctccggagattctcacacccctttccggcattaatctagaattttagaagattgggatttttcctggaaaaaaactcttctccagattaaaccagagaagagtgaatttctgaaaagcccaataaaagggctggaattggtgcacaaaattcgaatgtttccccacccaaaagagttccaggccacagtggattt

SEQ ID NO: 2224 - protein, 319 aa, Homo sapiens
  MOD_RES (258)..(291): Variable amino acid
MFVSFFFFYYTLSFRVHVHIVQVSYICIHVPCWCATPTNSSSSIRYIFQCYPSPRPPHHSPQSVIFPFLCPCDLIVQFPPMSENMPCLVFCSCDSLLRMMISNFIHVPYKGHEVIIFYGCIVFHDVYVHIFLIQSIIAGHLGWFQVFAIVHNVELTYLCMCLYSIMLYSSFGRHPLMRSLGPMVFLVLPSQARHTFPHHGRTSFYFYYLVLALFVPHFFLLLVAFLFFYRLLSIWFLLFSLSVFHLSSPVPFVVFSSXXXXXXXXXXXXXXXXXXXXXXXXXXXXXXXXXXACLVINKKGAAQSPIKRMRGIPPASPKN

SEQ ID NO: 2225 - DNA, 1639 bp, Homo sapiens
  source (1)..(1639)
  CDS (201)..(1439)
  modified_base (225)..(325): a, t, c, g, unknown or other
ttaattgagcagacaagtttgttttattttggagcctttttggctctggcttttaaacattgtcctggttggctcatttaatttttttttttttttttgagaccgagtcactcttgtcacccaggctggagtgcagtggcgcgatctcggctcactgcaagctccacctcctgggggatcctctagagtcacctaacagcatgcagctgcctgccgtttctttttnnnnnnnnnnnnnnnnnnnnnnnnnnnnnnnnnnnnnnnnnnnnnnnnnnnnnnnnnnnnnnnnnnnnnnnnnnnnnnnnnnnnnnnnnnnnnnnnnnnngttatctggtcgcagcgtgtctgcgtactgctgttgttgtattgtctctcgtcttttgctcgtgtcctctacgtcctctgctctctgttgctgcttcttgcgtgtcctctttctccttcggtctctgttgtttgttgactgtttattctctgctttcttcattcgtttttgtttctgtgttggcttctcgccctgtcgtctgctctcgcgcttgttgcgtcttttgtcttgtgggctgtgtctttttgttgtctcgcttcgttgcgtgttctctttctgtatctttcctcgtccgtgctttgttgctgctcgttctctgttcttctccgttcgttgttgtgtttctctcttcgtctttattttgttgttgtttgttcttgggctcgtttcctctcctgcgctgtcctgctctgtgctatctgtcgttgttgttcgtccttatttgttgttttcgtgtgtcttctcttacgttgcttcctttcccctcttcctgtttgttttggtcttggtctggtgctcttctctcttgctatgctcttcgctcttctctctcgtacttctgttcgctttgcgtctcctcttttccttctgtctgttcttgttcttgttcttcttgtattttctttatcgtcttcattgtcttgttgtttgtgtttcgcgttgggtggtgtggccatgttttgtttctgcttgggtgtgtgttctttgtgtttcttgctgtatgtattggttgtctgtggtgttctgtctttgtctgttgttttggtcttgttattattgtttgtttggtgttttcctctgtggtgatgttttgtgttgtgtcgttgtttgtttgtctgtgtgggtgtcggtggttgtgtggtgtctgttttgtatttgttttcttgttgtcttttttgttttctgtttgttgttttttccttttttgtattgtttgttgttgtttttttgttgtgtcgtgttttcttttgttgtttctgtgtatgtgtctttctttctttctcgttgtcgtctcttctattgtgtttttgtcttctattcgcattgtttttttactttctgtcttgtttgcgtttgtcgttcatgtttggtcatttggttgtggttgccctagtcgtctgtgtgtgttctttgtgctctttgttcttgctgttgttgctttctgtgcacttcgtcttgtattgtatgtgttgtgtgatctttgccagtgtctttcccgtgctcggtctcgtctgtttgtgatcgtatatttttttgtttttgttatttttgatttgtgatgtctggtgttgtttcttctttgtctttttttct

SEQ ID NO: 2226 - protein, 412 aa, Homo sapiens
  MOD_RES (9)..(42): Variable amino acid
MQLPAVSFXXXXXXXXXXXXXXXXXXXXXXXXXXXXXXXXXXLSGRSVSAYCCCCIVSRLLLVSSTSSALCCCFLRVLFLLRSLLFVDCLFSAFFIRFCFCVGFSPCRLLSRLLRLLSCGLCLFVVSLRCVFSFCIFPRPCFVAARSLFFSVRCCVSLFVFILLLFVLGLVSSPALSCSVLSVVVVRPYLLFSCVFSYVASFPLFLFVLVLVWCSSLLLCSSLFSLVLLFALRLLFSFCLFLFLFFLYFLYRLHCLVVCVSRWVVWPCFVSAWVCVLCVSCCMYWLSVVFCLCLLFWSCYYCLFGVFLCGDVLCCVVVCLSVWVSVVVWCLFCICFLVVFFVFCLLFFPFLYCLLLFFCCVVFSFVVSVYVSFFLSRCRLFYCVFVFYSHCFFTFCLVCVCRSCLVIWLWLP

SEQ ID NO: 2227 - DNA, 1279 bp, Homo sapiens
  source (1)..(1279)
  CDS (201)..(1079)
  modified_base (247): a, t, c, g, unknown or other
  modified_base (251): a, t, c, g, unknown or other
  modified_base (256)..(258): a, t, c, g, unknown or other
  modified_base (260)..(261): a, t, c, g, unknown or other
  modified_base (264): a, t, c, g, unknown or other
  modified_base (266): a, t, c, g, unknown or other
  modified_base (279): a, t, c, g, unknown or other
  modified_base (290): a, t, c, g, unknown or other
  modified_base (319)..(418): a, t, c, g, unknown or other
  modified_base (564): a, t, c, g, unknown or other
cgtccgggagggaggtggggggcagccctcacgcagccgccaccccgtccgggaggtgggcacctctgcccggccgccccatctgggaggtgaggagcccctctgcccgggccgccaccccgtctgggaggtgtacccaacagctcattgagaatgggccatgatgacgatggcggttttgtcaaatagaaaagggagaaatgtggggaaaagagagagagatcagattgttactgtgcgtgtgtanaaanaagtnnncnngtntntacgaaggcatcntcttcaaggtnctccaatcttttattattcttctgcgctnnnnnnnnnnnnnnnnnnnnnnnnnnnnnnnnnnnnnnnnnnnnnnnnnnnnnnnnnnnnnnnnnnnnnnnnnnnnnnnnnnnnnnnnnnnnnnnnnnnnggcgggtctctcgtctcccctcttcgcgtcttctcccgtctttcctctctcctcgtttcctctctcctcgtggcgtcgtcttctcgtgtggctctctccctcgctcctcctcctgtcctcgttccgtcttgtcgtgtcgggcctcnttcctgtttcgtgtctcgtcctcgtcgcgcgtgtgtcttcctgtgctctcgttccgtcttcttgtctctccgctctcgtctctctttgccgtgcctctccgccgttccgtccgtcttttgtccttctgttgtctccgtctttttgttctgctcttccgctcttgctgcttcttggtttttctgccttcctttctctctttctcggtgcttctctttgtctcttctcttcctggtggggcttctgccctcgttgtgtcggttgtgtctctcttcttctgtcggccttgtgttgtttcgcctttcgcccttcttctgtgcttgctttttctcgcttttgctccttgtgctctccttcccttttccgtccttcttcttgttgtccttccgcctcctccctttctgtttcctgggctctttcttttggccttctccctccccctgcttttgttctcccgcctccggtccggcctggtggctctcccctttttcctccgccctttgggagtctgaggtaggcagatcacctgagctcaggagttcgagaccagcctggccaatgtggtgaaaccctgtttctactaaaaatacaaaaattacctgggtgtggtagtgggtgcctgtaatcccagccacttgggaggctgaggcaggagaattgcttgaacctgggaggcggaggttgcagtgagctgagactgcaccattgcactccagc

SEQ ID NO: 2228 - protein, 292 aa, Homo sapiens
  MOD_RES (16)..(17): Variable amino acid
  MOD_RES (19)..(22): Variable amino acid
  MOD_RES (27): Variable amino acid
  MOD_RES (30): Variable amino acid
  MOD_RES (40)..(73): Variable amino acid
  MOD_RES (122): Variable amino acid
MWGKEREIRLLLCVCXXKXXXXYEGIXFKXLQSFIILLRXXXXXXXXXXXXXXXXXXXXXXXXXXXXXXXXXXAGLSSPLFASSPVFPLSSFPLSSWRRLLVWLSPSLLLLSSFRLVVSGLXPVSCLVLVARVSSCALVPSSCLSALVSLCRASPPFRPSFVLLLSPSFCSALPLLLLLGFSAFLSLFLGASLCLFSSWWGFCPRCVGCVSLLLSALCCFAFRPSSVLAFSRFCSLCSPSLFRPSSCCPSASSLSVSWALSFGLLPPPAFVLPPPVRPGGSPLFPPPFGSLR

SEQ ID NO: 2229 - DNA, 18746 bp, Homo sapiens
  source (1)..(18746)
  CDS (201)..(453)
  CDS (808)..(955)
  CDS (1224)..(1856)
  CDS (2001)..(2606)
  CDS (3013)..(3151)
  CDS (5893)..(6401)
  CDS (6523)..(6694)
  CDS (6814)..(7090)
  CDS (7799)..(7899)
  CDS (7947)..(8280)
  CDS (12144)..(12482)
  CDS (13251)..(13544)
  CDS (14041)..(14329)
  CDS (18159)..(18546)
  modified_base (1622)..(1721): a, t, c, g, unknown or other
  modified_base (7104)..(7203): a, t, c, g, unknown or other
  modified_base (8304)..(8403): a, t, c, g, unknown or other
  modified_base (14351)..(14450): a, t, c, g, unknown or other
  modified_base (18180): a, t, c, g, unknown or other
  modified_base (18183): a, t, c, g, unknown or other
  modified_base (18196): a, t, c, g, unknown or other
  modified_base (18239): a, t, c, g, unknown or other
  modified_base (18250)..(18349): a, t, c, g, unknown or other
tccttcagggtgacgcgcactgaataactcgcttgtcaccgggacacgcgcctccaggtctggggtgccttcccaggctgaggcagcactgacggggctcagtggagggcccccagtcctactgcggctaccccgcctctccgcggtccggctcggcttgaccccagtgcctgttccaggtgtgccccatctgctcggcaatgccctggggggaccccagctacaagagcgccaacttcctgcagcacctgcttcaccgacacaagttctcctacgacacctttgtggtaggcatcccgccagcaccgtcctcccccacgccctcctcatccaccctcctcctgctcgggcccctcgccagcctcagggtccgcagggttcagaggaagccagaaacagaagcctcgtttcaggtggccacattcccccaggttctgtgggggctgcctgcaggtggggagtgatggcagctgagtttgagtggccactagagggtgcccaggcctctcggggacatggaccgcacagggcaggtccctgcctgcccaccccacagaacccctcgagggtgagccaggcttccttctggaagctttctagagagcgcgggaaggactttcatcaacatcgaacactccagccctgtctccttttcccacccgccgcgggtcaggcacacacctggcccccgggcctgcagaccctcgcacaaactcctcactcctggtgcggcccctccctgcgccgccctgttcattcctggccctggctaacagtcctggcgatggctgtcactccctctgccagtcgtccgggacccacgctccgcctgcctcaggatggaaattgttagaggtcagggagccctggccggcctgctcacctcgcaaaccccgggcttagagtccgacctgaaccagcagccatccattccgagtgcccccgtacccagcgggtgatggacacaccttcaccttctcaccccccagaggaccgtgcaggccccgagcctgtggggacagtggagctgggtccttcctgtgtcctgctggagggaggcaggaagggtggacacgcctgtgtgggtgatgggcagaggggacctctccttcctgtctccctcgagcccggtgcatctctccttcctgtctccaggactacagtattgacgaggaggccgccttccaggctgctctggccctgtctctctctgagaactgaagggaagcgcagccacccgcctgcgtctggggtcagggatgtccccgctcctgtgtcgcacctggcacctgctcgggagtgcacctcaccggactgagctcacaggaggagcctgcacccgcgcagaaggggagccggggccgagcctccgggcctgaatacgggccagccgccgaggccgccagagcagggccgcctggtcccaccggcgtcgctgggttcttcggtgcttctggccgagcaggcggcctacttgggcagggctggacgctgagacctggagctgccaccgtctcttcaagccatgataccccctcgtgggaagaagggaccgacgcgcgagtcgcggctgcgcagtcgagcccgggaggaacccaggctgctgccctggccagcccgannnnnnnnnnnnnnnnnnnnnnnnnnnnnnnnnnnnnnnnnnnnnnnnnnnnnnnnnnnnnnnnnnnnnnnnnnnnnnnnnnnnnnnnnnnnnnnnnnnnccctcagcccccagggaggcagctgcctgccccacttttctccagagccatcatggccctgctcccaccccagccacggctgctcaggggcgctccgcatgctctggtctccatccacctgcagcccccactggggtgaggtggagcttcttgcctctccttgtgtctatttcctctgcttccacaactgaacggtgacaggtatttgctggatgagggagcacaccccaggtggtttcctctgagcctgggaggccttttcctgcctgtgggccccaggcccatcctgctgccacccccaggaggatgcccggctccttgtgacaagagtgaccctcgggaggcgtggggagtggggctggccggcctgcctgatggggtcctgagtccatggcgggtttgcatctcaggcctctgggctctggccgggctgggggctattgtccggctgagcggcctgggctgcggcccctccccgtccccaggaccagcctcacccactcgctctgccgcaggtcacacaggccgcctcctgcgggcattgctgggcctcagcctgctcttcctggtggcccatctcgccctccagatctgcctgcatactgtgccccgcctggaccagctcctgggacccagctgtgagtcgctgagggggcggggtagggatagccatcctgggggtcagggagagggccctgcagtgaccccgagtctcctgggggggttgactcagcctgatttatgtctggcctggatggtccaggtgaaacgctccagggatgaccaggccacggtgctggctgggcagagcctgacctgggttcccccgtctttctctgcaggcagccgctgggagaccctctcgcgacacataggggtcacaaggtaagaccattcctcccacccccaaccagcaagcctcccttggggatttcaggccccaggaagtggggggacccaggagggacagagggggacctggagactcatccacactcccacccacacctggagacccatccacgctcccacccacacctggagacccatccacactctcacccgcacctggagacccatccacactcccacccgcacctggagacccatccacactcccacccgcacctgcagacccatccacactctcacccgcacctggagacccatccacactcccacccgcacctggagacccatccacactcccacccgcacctggagacccatccacactcacacccacacctgtcctcttggtctgaccgcggctgctccctgctctccgcaggctggacctgaaggacatccccaacgccatccggctggtggcccctgacctgggcatcttggtggtctcctctgtctgcctcggcatctgcgggcgccttgcaaggaacacccggcagagcccacatctacgggagctggtgagggcagctgcgtcacccgtatgtcagggaggtcattcgagagctgtggtctcagccattttgagggttattttaatctttttaaaacagatgtagacgttttggttgtaagttggtgttaaagagaggaggaagttccaaatcccaccccggggcccagcctgcagttccatccgttcagacctgtttctactcgggctctgcctctagtcagaaacctccacgccccgacatggcatctgtgcccttaggaactcttcacaggggaattatttggggccacgcggtggtggaaacctgcagtgctgggcagtgggtctggctggagagccactgcagaagggctgagaaggggcggccccagcaggccccatgcacttacaggcaaacaggctgtcggcccagagccccagcaggggcctggaccccaggagcgacgggcctgaagcagggcctctgtcctcggagtgggaggcagagtgaactttagctgctacaagacttggaggtccggccccgggaatctctgagctatggccccctcacacggacagggcatgagctggggcctgcgacacccaacgttgactgctcagaccctctcgtccctgcctgggcccacacttgccatccccaggctcagccaggatttatggccacctgggtgtcctggcccacgaactccctgccccgggcacccagcctcctcccacctcaccctcccagtgcccactcgtcagatagctgatgctcgccacgcacatgggcctcaacttctagaggagtcccgagagggaaaggggttccccaagccacacggtaggtcgagtacacctgctcagcctgcagaggcggcctgccctcctgcctgtcctgtcgccaccccatggggcaaggctggtgcccgcatttcagaagtgggaacggggacctggaggtcaagtggcttttccgggcatttgagggggtccagcgctcatgaggactgtgctgctgcctgtcctccaagagacccgcccctccctcgtcagcccctccatgctgatgggggcatggggcatgagcttcctagagtttggctgctgggaaggggctgggtggctggactctggtcatcttcatcttggtgtgatgggagcctgagtgtgcagctgcgccctgggcggccagcgtggacagacttcagagtgagctgggggcaccaggcacctgcaggataccgttccgaaagatctagaagccccatgacccggcctggcagggcccccgggcgaccctcactcccacatatgggcaacacacacacgtgtttgcaggcatgcgacggagtgtgccagccagcccgaggggtgctggccgctagaggagggtgaggggcgtctgcagcatggctgcggcacgtggggcccaagtcagggccgggcctgcccctcggtggcctcacaccccaagtcagggccgggcctgcccctcggtggcctcataccccaagtcagggccgggcctgcccctcggtggcctcacacctgttctcccacagcagctgcctctgttctttccactcccagaaatgctcatttttcacggctctgctcagaagatttcccagggccagggccagggccaggctgtgggtggggtgagcgatggcgccctgcgttctgatccagcctcgcccccagctgctgtgtggtctctgagaggggtgggctcagggcctgggcctctcctgccctgatctccctgttaccctggcctcggagcctcccagcagcccctgcagccctggaggcctgtgaggacaggactggtctggttcatctgtcccgtcaagcccccatcccatttgacagaaggggaataggctccgagaggctgtgacttgcctcggcctgcagagcacggagactgtcagagctggggtggggcctatcgtccagccccacagcctgcggtctcagcccgggtacctggcgcctcagccaccaggagagcccccgagtcacagatggggacactgggccggtggcagccaggccagagccagggcatctgacgacagccgtgttctttctaccacacctggctttccctggtgtttgggaaatggctgtgttctgggaaatctttagtcaggtccagggaaaacaggcccggcaggtctctctccccagccccaggccggcctgtcacttcttctaggcagctggccacctctgtccccccagaggcttggggagggcaggagtaccacccctatcttccaggcagagccacccagaaggctggcaggggtacacaggagaccctggagcctggccatgtccctcaggcccccttggtctctagagaccccccggggtatagacagggccccgctgctccctgggtgcgtggttcggggagatgaggtggtataggacagtctgtggtctgtctgtacctggcaaggtcatcacgtgcctgggcttggcaggacagaccctgggtcttcggccagggtgggagctgctaccaggaaggcctgcaggaactgtgagcttgagtgaggaagtaggaaggtgtcaggcagacctcagggacggctggggcctgtgcccggggaggctgtcctgtggccctcagaggagcagctgtggatgtggctgccttccacgctcctggctgggcaggtgtgggctggagaggtggcgtcagtgcgatacacctgaccttgcccctgtccgtgaccttggcaggatgatgatgagagggatgtggatgccagcccgacggcagggctgcaggaagcagcaacgctggcccctacacggaggtcacggctggccgctcgtttccgagtcacggcccactggctgctggtggcggctgggcgggtcctggccgtaacactgcttgcactggcaggtacgcaccgaggcagggggcactggcagtcacactgggaggggtcttggagttccctgatgactgtggagacagcgggacacatggcactggccaggtaccaccctgtgtgcccctgccccgcaggcatcgcccacccctcggccctctccagtgtctacctgctgctcttcctggccctctgcacctggtgggcctgccactttcccatcagcactcggggcttcagcagactctgcgccgcggtggggtgcttcggcgccggccatctcatctgcctctactgctaccagatgcccttggcacaggctctgctcccgcctgccggcatctgggctaggtaacggcttgccacatagcccctttttcctgccaccctggtcccgcccacctggctcgtctagcccctgtggccccactgcctctggggtggtaggctgtgacgggtcttctctggacagggtgctgggtctcaaggacttcgtgggtcccaccaactgctccagcccccacgcgctggtcctcaacaccggcctggactggcctgtgtatgccagccccggcgtcctcctgctgctgtgctacgccacggcctctctgcgcaagctccgcgcgtaccgcccctccggccaggtgagcacctgccacccatggtgggtgggctgaggccaggccatggggctggtctcaggacctcctgcctctgggtggggtgtggagctggtttgggctcaagacgctggtctctgcagaggaaggaggcggcaaaggggtatgaggctcgggagctggagctagcagagctggaccagtggccccaggaacgggagtctgaccaggtgagcagccaggcaggtggagacgccagcgtggggggcgcccggccagcccgtgcatggctcagcgctgcttgcccacagcacgtggtgcccacagcacccgacaccgaggctgataactgcatcgtgcacgagctgaccggccagagctccctcctgcggcggcctggtgagtaccgcacactgcaaggtatggctgggtgnnnnnnnnnnnnnnnnnnnnnnnnnnnnnnnnnnnnnnnnnnnnnnnnnnnnnnnnnnnnnnnnnnnnnnnnnnnnnnnnnnnnnnnnnnnnnnnnnnnntgagaggctgagtcgttgatccacaatacagtatagggggcttacagtgtcccccaacccctccccagagaatgtggctatgctgtcttgtgctgttagctctgggagctgctccaggtggcccagtggccccaggaggccgctcgtccagggcaggggctggcctgggaactctgtgttggccatgtcgccttgggagggcatgggggctctttctggctactttctttctttaccctaaccgttgattttccattttgcaatgtgtttctgaatgaagcaaatgaagccacggccctggggtgggggtcctgagagtcttcaggtgcgcagagctggaaagggggtcagggccacctttcccaccctttcaaggaaagtgaggcccagagaacggcaggtgctggcagggccatccctgacgctcagggacggtgtcagcccaattgccggagccctcgtgttctgcccatagcccaccgggggcctgtctctcctgctgtgtgcttgcccagggcccagattttagggcatagtcagggtgggggggcctgcagatcaacctgccgaagctgaccgctgtccccacctgcagtgcggcccaagcgggctgagcccagggaggcgtctccgctccacagcctgggccacctcatcatggaccagagctatgtgtgcgcgctcattgccatgatggtaggcggctgtgggggttggggtgggcggccccctctgccgcgcaggtgtggggcatcgcctgggtggggtgcgctgggcagctgtgcagccccctctgccgcgcaggtgtggggcatcgcctgggtggggtgcgctgggcagctgtgcagccccctctgccgcgcaggtgtggggcatcgcctgggtggggtgcgctgggcagctgtgcagccctctctgccgcgcaggtatggagcatcacctaccacaactggctgaccttcttactgctgctctgggcctgcctcatctggacggtgcgcagccgccaccaactggccatgctgtgctcgccctgcatcctgctgtatgggatgacgctttgcctgcctacgctacgtgtgggccatggacctcggcctnnnnnnnnnnnnnnnnnnnnnnnnnnnnnnnnnnnnnnnnnnnnnnnnnnnnnnnnnnnnnnnnnnnnnnnnnnnnnnnnnnnnnnnnnnnnnnnnnnnncccaaagtgctgggattacagacgtgagccaccgcgcccggctttttttttttttttttttttttgagaccgagtctcgctctatctcccaggctggagtgcagtggcacaatcttggctcactgcaacctccgcatcccaggttcaagtaatcctcgcatcccagcctcccaagtagctgcaattacaggtgtgagccaccacgcccagccatcaaagtttcttattttcattgtagaccccaagctaagctcagaatattttctgatccgcgttgcaggggctgtgaggggcgaggagggtcatgggggtggagtctctgtgtcccttgggaggccacagggagtggatgggccccaactgcccactctctgcaggctccaggcacgtttcctgcctgctgaggctctggcagcctgggagttccagccgcctggaccgccctcccgctgcccgctgtggggttggacctcaattgactttgatccacttgtgcgggggggggggagctgagaccccccttgggaaccaccttggggtctgagctgggccaggactgtgttgctctcccgtatcctccaaacagagggcggtgaggccacgtgccaagcctgcagcctgggtgacgagggtagcagcaaaccctccatcctgtgacatgtcacctacctgccctgtgggggccatgtccattttgtgcccacgttttaggagagcgcgttttggagcaaacactcagagacctgtccccaaaggccatgggccaaacgtgggtggggccgggccctccgctggtctttgggtttggagggtgaagagccactgaaaggaaggaaggtccccagggagggcaagtgtaggcagcaagagaccttccccagcagagggcagagaggaggccaagcaggaccagggggcgtgactgtggagacaggctcttgggtgccacccttctgggaggtgctggacgcatcaggctggcagcgtcggggcctgtccatggctacgaggtgtccaccgggctgcgtttttccaggggactctggggaggatctgcttcctcttccagctgctccaggtgcctaccttcctgggcttggggcccctccctccatctccagagccggtggggtggggtcaggatcacaccctgtctctcctgctccctctcccctgcggtaaccctgtggcttcgtcccatctgcctccccggctaatccaggccgacttccctggtttaaggtcagctgttgggcagcccccatttcctctgctgcctggactcgcctctgcatgtgagcttctgcgttcacagattctggggactggggtgcaggcatcattggggtccatcgttctgccagctgcaggtggaaggtcgctctccggcctcgcgacatctggctggaagcatcccagaggctcctcctagctcgtggtgctgtggggtgggcaatggtcttttttatttattttttttgagatggagtctcactctgtcacccaggctggagtgcaatggcacgatctgggctcactgcaacctccgcctcgcgggttcaagcgattctcccgcctcggcctcccgagtagctgggattacaggcgcccaccatcatgcctggctaatttttgtgtttttgtagagacaggggttttaccatgttggccaggctggtcttgaactcctgacctcaggtgatctgcccacctcggccgagactacaggcatgagctaccgtgcttggctttttttttttttttttttccgagtgggggtcttgcttggttgcccaggctggagagcagtggcatgatcatggctcactgcagcctccacctcctgggctcaagcgatcctcctgccttagcctaccaaagtgctgagaatacaggtgtgagtcactgtgcccagcgcaggcactgatcttggatcatgggtagaattcaggggtgcagagaggcattttgggaggggcccagtgcggccgagtgctgggagtcgctggggcccgaggcccaaacccctccaggatgcatggctggagtgggtgggcacccccactcccggtccctatcctgggcctcccctttgctctgtggagccggttctgtctgttcccaggcccctggcgtttcgccgtttgttccgtaaatatttcatgcccagggcgcaattggaaacactttcctttaatcagcagtgggggaaggcaggcgcccagccaggccaggggaggagctggggtgggaagatttggagaggacccgggaggacttccctgcctgagcctcgtcagaggcccttcagagacggagacgctgcccagttttccgggagggagagaggaaagtgtgaggcttgcccgagccgagtgcccggggctttatgatttgtgcagctgctgggcttggcgtggccctggtggaagctctgacgccatctgagccttggtccccttgtaggcatcagcctgatccttggggggctggaggttgagctcagactgaacagggaggagaggagcagggactggggctggggcagagggaacagaccctggtgctccaggcagggctgcaggcagagccacagggggtggctcccagagacctgcttgtcatttagggactcagaagccccatcctgccttaggataaaacccacctccaagactgaccctgctgtctggagagagaccaccccccacctcttaccatgccccctgcagggaggccctgccaccctctccagcttcactggtcccccagctctgccagccttgtgtagtctccatcctctgtctcaaaaggcccctctcgtggccccaccccacagctcagccctagctgtcgctgggtgggcctcatggctcagcctcaaggcaccctgggtcccttggctggtcccatgcacaccccatggatcaggttccggggggctcccatgcacaccccacggatcagactcagggcagctccacactccccacagaacaatcaggcccagcccttgtccggcaggtgtggggatggtggctatggaccacacatcaggatgctgccgtggtggggcccctgagcctttgcagaccgtgcaggggtccaagggctccggctctgggggaggtccatgctctgtcaaccatccggtctgcgataccctggggcctccccgccccttcctgtttcctcctgagagccctgcaagctggagggggagccccggcccctttttttttttttttttgagacggagtcttgttctgttgcccaggctggagtgcagtggcgcgatctcaactcactgcaacctccgcctcctgggtttaagtgaaagtgattctcctgcctcagcctcctgagtagctgagattacaggtgcccatcaccacgcctggctaatttttgtatttttagtagaaacagggtttcaccatgttggccaggctggtctcaaactcctgacctgaggtgatccacccacctcggcctcccaaaggtgtgaaccaccacgccaggccccctgcaccttcttctgggtgggcaagagccatgctgagcccctcccctgccatggataggggtggcaagaatagtccattccccatgggctccctccggcaggcagcggatgggttggggcccacacagtggttcaggaacaaaggctgaagggcggttaccggccagagctgggcgggtccctggcctgagcctcctctcactccctttcccaggatggaaaggccactgtgagctgggtgtgtcctgccaggagggagttggagtcgggggcaggagacccactgggtctcctgggctcctggaagaggcagcagtgggtccctgcggaggtggcctgatccccggctcagcctggttttcccagctttgcatttgggggtgggacctgcagggggagagtgagggggtgggcggggacaggggctgcaggtggaggcacgagaaagccacccgaccccttgaggtcatgctgtttgcgtcggagaagagggccggtgtcagggtgccccctcggcctctgtgtgcacctccccgctccccgccccgtgcaggtcagcagagcctcgatccctctgcacgttccggccccctcccatctccagcagcgtctcttcccggggtgcccctcggactctcagctccctagtctgatccagcccaggcagggagcgggcgtgccacgtggccaggagtggcctccaggcccagctgcggccccttcgaccctggggagggatcatggcccagctgttctaacatggccagaccaggacactctggccggcccgagaactgaaccgggaaggaggcagggaaaggggagggaggaagacaatggggaagcagtgacgtccgagatgtagccagagacggacatcctggactgtcgtgcagggcaaggcaggtgggcgggagccaggtggcctgagagcccctccctgcccaggggtctctggtcaggcagttccttcccgggctgctggatcgtgtgtgcagggaacccgtcagcctggctgcccaagggcccagatgtcctctcagtgcccgggggtccttgacagccccagcaggagccccacgtgcctgtggggcaggccccgcaggtccctctctgtaggactcagaataccttctccaatgccacgtgctctccctgagtgcccagtgccacagagggccccgctggcgaggttacttcaacgtcaggctagagggtgcagcgagcaggactcacaggccaggttcccaggcaggtgtggcaggagcccattccctgggtcggtgttctcatgtctccccacggtgaccctgctgtacagaggcgggggcgcggggcccctggctggtgccctcctgctgccagacttgtgctctgctgaagaggggctggcgcggcaggtatgagcccggcacggaggtcgtgagcagtgagaagcctggcacctatgggttcggggcagggaggccctggaaggtcctgtcctccgggagccctgcacagcaccccctggtggtggctcctgttcgtgtcggggctgcagcctcccttcctggacggttttccattcctccttcccactctccctgctgctcacccctcccatcttccacaggtcagaggtcatagctgcagggtcagcaggtcagggcctggggcaaccctaggaaggtgtgagtgtgagaagctggtccaaacctgcctcggctgcctggtggtgcggacagggagtcctgggcatccgtgagggctgcctcacggtcaggcttagggatgtgcagggtgacttggacgtgggtcatgagtctttgctccagaaagagggggctgagtgtccaaggccaatcccgagtctgtcacctaacaccatttgtgctcaaaaaactgaacagagtggacacaggccctgagtttgcgccccgaggccgagagagggcagatgtggtggtgacattcaccaccttggacccagacccagatgctacctgtccctgagctccaggaagttgtgagaagggcctgagctgttctgcactttctcgtggccgggcgtggctggtggtgcaggagttgctgccccagggtgagggcccggaagctcctgccagcaggtgccggggtggaaagggaagctgtccacagccctgtcaggactcagaacccggtgggtcaaggactttggtccggacccctgctgaagggtgagctgtccacatgtgcgccgagagcagaggtgaagccagggctcctgagtgcccccagccacagggtgcgcccgcccagcccctgccctgcagccgaaggcctccctgctggggggctgagtccagtggggccacaggcagctgggagcaggacaaggctgccaggcaaccaaatggtgctgccgcttcctgccaggtgtgggtgcacagagagagannnnnnnnnnnnnnnnnnnnnnnnnnnnnnnnnnnnnnnnnnnnnnnnnnnnnnnnnnnnnnnnnnnnnnnnnnnnnnnnnnnnnnnnnnnnnnnnnnnnatctcaacatccagccagaccgggcgccactgtgtgcttggtccccctccgtgaaggggaactcactactgtttatggctgcccacaccaccgtctgagggccggattgtcagagggagggtggttttttgtttttttgtttttttttttttgtttttaagacggagtctcactctgtcacccagactggagtgcagtggcgtgatctttgctcaccgtaacctccacctcctgggttcaagtgattctcctgcctcagcctcccaagtagctcggattacaggcatgtgccaccatgcctggctaatttttgtatttttagtagagacaagatttcaccatgttggccaggctggtctccaactcctgacttcaggtgatccacctgccttggcctcccaaagtgctgggattacaggcgtgagccaccgcacctggccaggaagggtggttcttaagctggggttcagtggacacatcctgtgtgatatgggggttctgagaggcagacagggttgttttcagagcccccagcgaaagtggctttcagtgccagtgccaggtggctggcagccctgtgctcttgggagatgaaggggatggacatggtatttgccgtgtgcctttcccgggatgtgtcttctgcctggcagatggcctaatgcctagttgtctgacctgcaaccatgagtccccccaggaaacttgctcacactggcagacgccccgtggctcctgtctgattcacgtccaggttatgcctgcctgaccatcgctctggtgttgggagcctgccctctgtcccccacgtccccgagaaaacccagcctgggcagcccctggttcttccttgtggaaggtgcaaattcagtccccactgcagtaggaaacatgttcaaagacttactactcacaggtcttgggcagggagggcgccaggagtgggaagggccatcctccgtccccagatcccacagggcagaagtgaagagtcaggcagagagaagacagtgtgtggtaacgggccgtatgcacagggaatggggagtggtcactgcaggttcacaagcaaatgcctgaatggtctgattaaaggaagtgcagggagtgcgggcagcccaggctcctgggtgggagatacgcccctaagtgctcatctctggcccctgacatgggcggttgagcgtggtgtcctcctggtgcccaggctgcaggcttggctgtgctgcccgttagaacagtccctacccacaccaaacgtaagacacatgaaactgcacaatgcctcagcacaggcaagggagagtgaccggtgctgaggggagcccttgggcctgcggcagatgaggtgagacttgagccatcaagcagcgaggcagcgtgcgtgtgagtctgcaggccacaggcgtgttcgtgcgtgtgtccatgggcgtatgcgtgtgggaagtcgcagtagctgctctgaggtgacatggaggctgggcatcagcgggtaagtcccgggcaccaggagagggatctgtggggtccccggcatcgtcctgccgagttggatacctgagctcggttccagcaacaccatccgctctctgccagggtcctttgagattcccacctgccgtgtgagggagctgacaccttactcgcggcaggctgtggggccacgccctgcagctgagggaaggaagaactcaggcccgctgagtgttcttttgtccagccacaaagggagcaatgcctgccggacgaggggctggggccgcatcatacctgggacccggatgagcactgtccagggctcctgcgaacaggggcgggcctgggacagggggacctggggtgggagacataggagaggggacccctgggggagagggacttggcatcccttccggatgcaggccagcagcaggttacacaggcccttcgtaaaggtgctttctctgtggcctgcgccctgggtcaccccatcagcagggtccttggagccccagtgcctgcagaaatgccagggacagcattgacagcgtgctgacggacagcaccgtggattgaactgtgtccccctaaaagatgctggggtccccccaacctctgggcatggggccttattgaaaatcgagtcttcacaggtcccatcaagtcaaggtcaggccattaggtgggccttaatccaaggactggtgctctgatgaaaagaggaagcttggattcagagcgcagggggagggtgacgtgcgggtgcagaggagttgtgtgttgaccacaggagccagccaagaagcaccaggccgctgcggccgcccccggcccccacccctgccccatggcacagcccgcccacacctgggtactagacttcctcctgagctggcgacacttagactcctgttgtgttcggcaccccagggtgtggccccttgatacagcggcccagtagacccagcgtccagaccgggatgaggccacaggccctggcttgcccctgattcgagggactcgtggaaacaggccactgctgtccatgcagaacacaccccagtccccacaaacccacagcaggtgcactgagggttccgagaaaagcaccacgtgggtgccactcccgtttcctggggctggcgccacagccgctcctctccagagactctgggaagctcacacggcagactctgcaggggttgcactggccccgggttcagcatgccatccaccactggaagagcccaaaccgcggccaagaccaggactgcacgtcagagggtccgggtgggcttccagccaggcttctacctgccgaggccctggctctgagtgggtgccatgtggagtctccccttgccctgcaaaaatgtatctccagccagccacagtggctcacgcctgtaatcccagcactttgggaggccaagctgggcggattgcttgaggtcaggagttcaagaccagcctggccaacgtagtggaaccctgcccctactaaagatacaaaaattagccaggtgtgatggcgcgtgcctgtaatcccagctactcgagcggctgaggcaggagaattgcttgaacctgggagactccttctcaaaagtatctctacttgtgcccgagagcccactgataattagagatgcattccttaggctatttttgtcaaaataccaaagtgcctttgacattgtgatgccttgctgagtgcatttaggcctctttttcctagagtgagtttagagagtggcgaaccctggggatgtggttatagaaggaagggcggcggaggcagcaacaccggagatggctttttcaggccatccctcgatggggccgggtcctcccaggtgtttcggatcggaggaggctgactgtagctgagggcaccctcccttcccaccttcctcctccctgcatcacatcctgggcagagttaggggtcccccatggaggcctctggggttttccaggtgggctgccaagtaggtgccctggctggaccacagggtggaatgtcagccgggtttgcctcttgttagcaggagatttggggcaggttttctgaatatctgttttcatccatgaaacaggaaaagtggcttctgcttccttccctagggcctcaggagcctaaacccaggtggccccaaattagaggaatcctcaggcaccacccagacgcacccagaggatcctgggagggtcaggctgctgcggcaggtgtgctgggcccccccgtcgnggngtcccggcgcgcnggccccctgccgtcgggagccccccccctctccccccccccgngccccgcgccnnnnnnnnnnnnnnnnnnnnnnnnnnnnnnnnnnnnnnnnnnnnnnnnnnnnnnnnnnnnnnnnnnnnnnnnnnnnnnnnnnnnnnnnnnnnnnnnnnnncccccttccccaccccggccaccgcgcacacatgcagttatggaaaggcatgggatgagtctcgcgaaccacaccctgctgccgccgccttggagtacccaaaatgctggtcgtggctcatgagatccaggtataagaattatcagcagtttcttgggggcccggcctggggccaggggctctccattcccacctgacccctttctaatggagaagttccctggtccctgagacctggacgcgctttctggggagcagggttcatgcttcccatgcagctgcataacgtgaaaacaagggcatgctgccccaagtctgcgacgggcctggaccgcgcagggcaggagccccagctcctccagggcgagccacatctggctttgtgcctcgctgtcag

SEQ ID NO: 2230 - protein, 1493 aa, Homo sapiens
  MOD_RES (267)..(300): Variable amino acid
  MOD_RES (1372)..(1373): Variable amino acid
  MOD_RES (1378): Variable amino acid
  MOD_RES (1392): Variable amino acid
  MOD_RES (1396)..(1429): Variable amino acid
MPWGDPSYKSANFLQHLLHRHKFSYDTFVVGIPPAPSSPTPSSSTLLLLGPLASLRVRRVQRKPETEASFQVATFPQVLWGLPAVVRDPRSACLRMEIVRGQGALAGLLTSQTPGLESDLNQQPSIPSAPVPSGEAQPPACVWGQGCPRSCVAPGTCSGVHLTGLSSQEEPAPAQKGSRGRASGPEYGPAAEAARAGPPGPTGVAGFFGASGRAGGLLGQGWTLRPGAATVSSSHDTPSWEEGTDARVAAAQSSPGGTQAAALASPXXXXXXXXXXXXXXXXXXXXXXXXXXXXXXXXXXPQPPGRQLPAPLFSRAIMALLPPQPRLLRGAPHALVSIHLQPPLGPILLPPPGGCPAPCDKSDPREAWGVGLAGLPDGVLSPWRVCISGLWALAGLGAIVRLSGLGCGPSPSPGPASPTRSAAGHTGRLLRALLGLSLLFLVAHLALQICLHTVPRLDQLLGPSCESLRGRGRDSHPGGQGEGPAVTPSLLGGLTQPDLCLAWMVQVKRSRDDQATVLAGQSLTWVPPSFSAGSRWETLSRHIGVTRLDLKDIPNAIRLVAPDLGILVVSSVCLGICGRLARNTRQSPHLRELDDDERDVDASPTAGLQEAATLAPTRRSRLAARFRVTAHWLLVAAGRVLAVTLLALAGTHRGRGHWQSHWEGSWSSLMTVETAGHMALARYHPVCPCPAGIAHPSALSSVYLLLFLALCTWWACHFPISTRGFSRLCAAVGCFGAGHLICLYCYQMPLAQALLPPAGIWARVLGLKDFVGPTNCSSPHALVLNTGLDWPVYASPGVLLLLCYATASLRKLRAYRPSGQRKEAAKGYEARELELAELDQWPQERESDQVSSQAGGDASVGGARPARAWLSAACPQHVVPTAPDTEADNCIVHELTGQSSLLRRPGEYRTLQVRPKRAEPREASPLHSLGHLIMDQSYVCALIAMMVWGIAWVGCAGQLCSPLCRAGVGHRLGGVRWAAVQPPLPRRCGASPGWGALGSCAALSAAQVWSITYHNWLTFLLLLWACLIWTVRSRHQLAMLCSPCILLYGMTLCLPTLRWKGHCELGVSCQEGVGVGGRRPTGSPGLLEEAAVGPCGGGLIPGSAWFSQLCIWGWDLQGESEGVGGDRGCRWRHEKATRPLEVMLFASEKRAGVRVPPRPLCAPPRSPPRAEAGARGPWLVPSCCQTCALLKRGWRGRYEPGTEVVSSEKPGTYGFGAGRPWKVLSSGSPAQHPLVVAPVRVGAAASLPGRFSIPPSHSPCCSPLPSSTGAGVEREAVHSPVRTQNPVGQGLWSGPLLKGELSTCAPRAEVKPGLLSAPSHRVRPPSPCPAAEGLPAGGLSPVGPQAAGSRTRLPGNQMVLPLPARCAGPPRXXVPARXPPAVGSPPPLPPPXPRAXXXXXXXXXXXXXXXXXXXXXXXXXXXXXXXXXXPFPTPATAHTCSYGKAWDESREPHPAAAALEYPKCWSWLMRSRYKNYQQFLGGPAWGQGLSIPT

SEQ ID NO: 2231 - DNA, 34551 bp, Homo sapiens
  source (1)..(34551)
  CDS (201)..(371)
  CDS (657)..(890)
  CDS (2241)..(2414)
  CDS (3202)..(3349)
  CDS (7742)..(7890)
  CDS (19737)..(19817)
  CDS (24050)..(24316)
  CDS (25959)..(26162)
  CDS (29915)..(29999)
  CDS (34152)..(34351)
cccagatgtcacaggcataccagcttgtatctaggcattgccccctgcccttcccaaatcccacctgctcaggaagagcagaaagctgagccagtgctggaaggcaccactgccagggaggggggctctgccgagcacccttgcaagagcatgcccaacagcgtagcttcaaacagcacatagaagtgccaatccattttatgcttctgttttttcatcacagatttcgagtcctttgggatgaagaggtagcaagggtgggtcctgagaaggcctctctgagccacgtggtgtggaaattccagaggacacgcgtgttgatggacatcgtggccaacatcctgtgcatcatcatggcagccatagggccggtgagtgcggcagcccttcctcctcatctgctaggtccccagcctagcaaagaatgtcattagttactttctctacgagctggtgggtttagtgcattgtcattatctttgcgctccttgggggcgaattttcataaagtgaatccttgtcaagcacagcagcagccactaaaattaattaaaaagtttgcctcttaaagtcagcttgctggcatgatctgaggcctcctatgccagcctcagccctcagtggccctctcttctccccaccatgctgttttacagacagttctcattcaccaaatcctccagcagactgagaggacctctgggaaagtctgggttggcattggactgtgcatagccctttttgccaccgagtttaccaaagtcttcttttgggcccttgcctgggccatcaactaccgcacggccatccggttgaaggtggcgctctccaccttggtttttgaaaacctagtgtccttcaagacattgacccacatctctgttggcgaggtaagctggctcagaggagtttaatgttggaaaatgggccctgagtggtttgagtgcatgtgagatgtggatcctgagtggagcacctgccttccttttgcttgtctatgacctgcccatcatgtcccatctcctggctaagtgaggtggtggagacacagaacaccagaggagttcagagagggagggctcagttcaggctggagaatttggagagacttcctagttccagcgggaacagggctcagggagacttaatccaatcgctttgatggtcagtggggactgtggaggagtactgagcacactataggcatttaataaaatggatgaactgatggctccaataatcccaattgtgtagcatagggggtgccaaaaccacaatgaagaccatgcctattggacttcagagttgacattttcttaagctcttaatccttaacacttatcaaaaacaaaaaacaaacaaacaaaacacacacacacaacaacaacaacaaaaactcttgaatcaagggaaccccaggtggtgtggggtaagataaaagacttgcttctttcttactagttgctcttttagcaagctcaaagcatttaattatgattagattcagttgcatatagcaaacccaaaataacagtgaattaaaaaaaagtaattaatttcactctatgtaaaaggaatctagaagggaataatgcagggttggcacaggagcttccagatctttctgcttttctttatcactgtctttgcacatggctgtcatcatggttcaaaagtagatgctagagatccagccatcccagccacgcttcagacaggtggtaggagaaagaggaacagaagaaggggtgccttccaggttgagttggctccctttaagaattcatcacaaatgtcccattctacactttggcttacatcacattgccctcaacatggacacatggccacactccttccacaaaggaggctgggaaatgtagtcttttctgggcccatctcttcccgaaagaagcggagttgtcttcacaaggaaggctgagggagaagggggtgggggagactgggtaggcagctagcagtccctccagcatgctcccagatggtaacattacactttgtctttctgcattgagatgatcagccctaaaagaccagcctctccaaagtcgtaccagaacccataaaactcatcatattggtccccggtgaccccttcctgctttagagaagtttttctcctttctccctagatcccctcggccaatctgaaagccttcatttaaagacatgtttgactgactcttccaaagcctgaacctttgcgcttttctttccaggtgctcaatatactgtcaagtgatagctattctttgtttgaagctgccttgttttgtcctttgccagccaccatcccgatcctaatggtcttttgtgcggcgtacgcctttttcattctggggcccacagctctcatcgggatatcagtgtatgtcatattcatacccgtccaggtaacggcaggcttttgcgcttctaactgctttgtatttgcatttcacacactttcactgaattgggtggaaggctgcatttctggcgcatgaagcctgtgccccattttgtactcacagatttacttcctttggcacagagtagtggttttttgtttgtttgtttgttttgttttttgttttgtttttgtttagtgacagggtctcgctctgtcacccaggctggagtgcagtggtgcaatcgtagctcactgcagcctcaacctcctgggctcaagcagtcttcctgtctcagtcctgccaactagctgggactacaggtgcatgccactgtacctggctagttaaaaaaaaaaattgtagagatagggtctcgctatgttgtccaggctggtcttgaactcctgggctcaacccatcctcctgcctcagcctcctgagcagctgggattacaggtgcaagccactgcacctggccacagtgaaggtttttaaaaaaagcttgaatttgaatgctctaggaagtggaatgcctcttcaatttgtcaaagcccccagcactctctttgagtcctggcaattcatgcctttacatgacctgcctgaccccccatggtgttcctcagacagcatcaacagccacaactcaagggaagaacttggctgagaatctgaagccaacttcctttagaactttttctggcacttacactcccatttctggatttttaggccagctgcaactcagcacttctctctgaaaacagtgtttgtaccttgatttcagatgtttatggccaagctcaattcagctttccgaaggtcagcaattttggtgacagacaagcgagttcagacaatgaatgagtttctgacctgcatcaggctgatcaaaatgtatgcctgggagaaatcttttaccaacactatccaaggtaggacaagagtagctgcttaaagaaccacttaccttgtagaatatgctcttctaaggggttcttacggttcccagggccaggcattccagaaggaggctgaggggaccctctgagctgctctgcaggtcaaagaatttttcaaaggattatggagatttaataatagagccaggcatctgttctggtgaacccaggggtgagtgacatatggtttctctttcctggggcatgtggatcctggtcctggcgagttactttttataaaaataatccactaaaaacattgtgagcaggaaaaaagctgtctccagctatttacttaacttagaagacatctacacacacatacactcacacatccagggttacacagacctctttgcctgcagcagcgtccttgtgttcggatggtccactgactcaacactccttgggcagacacgaggagatgcatatgtagttttactttttttaaagctgatatagaaactattttgatcaaatataaatgcaaatctaattgcagggacatttacataattgctgacatagactcaggtggttcaccagttaatgatctgaaccactgttacaattgactgtctggatggacaattacacttttgcaccagcatggaattgggccaaagctgtgtatctgccctctagggagtggctgtagagaacctgcttctgagctggccaaaggaagtgccccaggttgggaccccagcagcactaggggaccctctttgaaaacccagaaacacatcctcacactctgagttcacttcagtgcaatttaatttgatttgattaaatttgattccatgtgatttcaacttaatttaacttgtcgatttagttcaataaatatatatcaagttcctactttgtgcaaggccatgggagctacacaaatgaaatggaaaagtttcctgcttttatgagtaagggaggataagataacttagctcaaaaatagccacgagtttgttggctctaccttcagagtatatccggaagccatctgctcgtctccattccactcccacccagtccaagccaatatcctctctctcctggactatgcaagacatctaggcactgctcctgccttccccctccctcctgcaatccattgtgcactcagcagtcaaagtgacctttaaaagatgtcagtcagatcctgttcctcccctgttggaaaatagtggcttcttatcacacttaagattattcaaagttaggtctttggaaggaaatccaaattctttcatatggcctgttaggtcagacatgatctggcccttggtgacctctctgacatcatcatcacactttactgtaaccttaggaaactcagctctagcggtgtctgccttagtttgtttctagaaccacacgccacactcgttcatgcctcgggatccttgcaattgctgtttcctttgcctggagtgcgctcctgctggatgtttacagtaactttgtcttgactttaggtctcttctcaatgtccagagaggacttctgggctgcagttccaagcatgtccatgccctacctctcaatcacttcatcctgctcatttctttcagatcactcaacacaatttgtaattatttaattgtttatttctttcttgtctatctatcccactggaagagggccgagaccctgttcactcctctattctccaaacacaggtgcagcacctggcatgtagtagacatcaggttcaaatatcttaagtgagtgaacacatgaattcacgttattctatgggggaagatggaggaagtgccacaagagaaacagagatgctccatgggggagcacactgggttggggagactgggaatggcttccctgcagaagtggctttcaggtaggccaaagggataggaaggattgggacgcacagagaactggggaagcccacttagggaggagcagaggcctggaggtggagataagagggtgctcttggggactagggggtgctggatgttctttaggggaagggcacctggatagcagagcttggatcccaggagaagtgggcttcgattctgccctgatcactgaaaaggcaagttttcagtgaagcaaacctgcgcaagcaaaccttcgaagacagtttgctctcctgtcaaaaaggcataaaataacagactctctctcatcatgcagtggtgaggacgatcttatgagaaagcacctgtgaagtgttgagcagagcacctggcatgtagtgatcacgccattagaacatctggagctgtcctgtgtggatatgaaagggcttttgcagaggaggctggaattggggttgaggacaaaaaacaggaggtgaaggaggcttgaatgtaatttgtgagctttgcagagccgtgggcatgttctggacttaggaaggggagaatactcttgagtttttgtgtctattcttgggacaccaggcaggtgccttcaggccagcacatgtgttttatttctccccatacagtatagtatttaaaaatgttttttcatttagttcccaacatttaaaaatagggagatgtctcagaaaaatctggacctcatgggaggattgcttgagcctaaatattcgagactagcctgggcaacatagggagatcccaactctgcaaaaaattaaaaaaaaaaattatctgggtgtggtggtatgtgcctgtggtctcaggtactcaggaggctgaggtggaaggatcgcttgagcctgagaggtcaaggctgcagtgagctctatcatgtcattgcactccagcctgggtgacgaagcaatactctgtctcaaatataaataaataaataaaaatctggacctcagactttgaaatggttgacgatctggttgttactggaccgaactgtggcctgcttatctggcacagtaaggccaaatatccacgctgaggttttgccgcaggagaaaggagggcctttatttgctgcgtgccaagcaaggagaatcaggcggctcatgcttaagacctggcctccccagtggcttgcaagcaagggtttttaaaggcagggctaaatttcaggaaagcgaagttacaggcaaaatcgtaactcatacatggagattatgtattggtttggcctgaaagggtggggtatcttttttttttttttttttgagacagagtctcgctctcgcccaggctggagtgcagtggtgcaatctcgactcactgcaagctccgcctcctgggttcatgccattctcctgcctcagcctcccgagtagctgggattacaggctcccgtcaccacccctggctaattttttgtatatttagtagagacggggtttcaccatgttagccaggatggtcttgatctcctgacctcgtgatccacctgcctcggcctcccaaagtgctgggattacaggcgtgagccaccactcctggctgagggtgggatatcttaaagtaggcagcttataaatcatgggtagattgaaagattttctgatttgcacctggttaaggaaaggaagctttgtctaaagatttggagttagcagaaaagagtgttggatccggcctttgggcgtgacctcctccaggcccctcaggaagaaatttagaacaaaaactgcagtcagagctctgtcctcggctcccccttctctgaggtctgtgtgccaatggatcaattggatgggggtccaggttttctgaaatacaactcaaggacatatgttaagatataacctttagtttctatagggaaccaaacattcttgtgactctaacttccttggctgttgtttcaggctattgttaccttcttgcttatcaagttactcatttacttctaggggttagctgggtgcctagaatttcccttgaaggaactcaagattttcctttgtttccatacttgcagttggtggggagcaggctcctaggagaggtccctgctgcatttcatggtagcaccagcctcccctgcactgagaagaggctgcccctttgattctcctctccattctgctgcgctgcagagccccgctctggtcttccctcctctctggccccacttccttcattaatggtacttgcctggcccttctaagcatctgagtttatggcttctgacacacagagtgtcagggctggaagggaagttggacaccatccacttacggcagctgacaggtaccgagctgtgagtacctgctgggtttgtgcccggggctttctgtggttcctctcatttaaacttcacaacaggactcatgagcgcccatctggaagaggaccaagtagggctaatacatttcataatgctagtgttcgacatgcaaaatgagaccaccttggactgtgttctattttgcagatataagaaggagggaaagaaaattactggaaaaagctggatttgtccaaagtggaaactctgccctggcccccatcgtgtccaccatagccatcgtgctgacattatcctgccacatcctcctgagacgcaaactcaccgcacccgtggtaagagctggctccagatcgaggctctttcacaacctgaccccggcaagtcccaggtgggaagcccttcctaccgtcgctcaatactggcattaggaacatccaatcatggcaggccacaggatgtgacttcaactccaactttttttttttttttttctgagacagggtctcactcagtcacccaggctggagtgcagtggcgtgatggcggctgactgcaacctctgcctcctgggttcaagcaattcttctgccacagcctcctgagtagctgggattacaggtgcctgctaccaccacacctggctaatttttgtatttttagtagagaccggggtttcaccatgttggccaggctggtcttgaactcccgacctcaggtagtccacctatcttggccttctaaagtgctggaattacaggcgtgagccacagtgccgggccaactccaacttttaaaaacaaatgcttgggctgacaaggggcccgggagagcctggcagcggttcttaatcacgtccatggctgggcaggggtcatagttaatgttggaatgcaattttaagtgtggaaaaaaaaatggaaaccaaacaagcagttggctgttttatctacttacactacaagaaggagagtttgagaaaattttctcggagggaggaggtataggtattaagagaagtagtggtgttggggtcaaagtctgggcttaggagcccagtctgccttgtttaaatccagactctgctacttagtagctatgacttatagcaaatcattgagcctctctggcctcggttttgtaatctgcaaatgggacgataatagccacaatcagcactgttgtgaggactgaatcagttattttgtgtaaagcatgtagaaccatctcaggctcttaggtcctatacaagtgtcagctattcttcttagcctgattctcatctgggctaggcaaatgaggattgaaagccttagagggagaactgggatgaatgtgagatgttcaagttctttacaaggggcctggacatccaaagataacgaaatgctaagctagagggaaaatgattcctggcttaaataaagaaaaaaccaactaaatattaaaccaagtaattggaggaaagccaacaaaggcaacaaaaaaatgagagagagagagagaaggaaataagcaagttcatagaggaagaattgcacctaaaatcagggacctcacgggggaggaaagaggtgacgtttgcaaagccagaatggtcttgctgagccatcctttgtggggcccatgactgccctgtgtttaatcccattactgccctgtgtttcttggtgagttgcttttattttctctggttcttcagcaggcaatcactcatgcacagtttattctgacacactttagggccttcagcccagctgtgagcccaaagccagattgaatggcaaggatacaccaaggctggatgtaacgctgcccaattattgtggctctctgtgatcccagaccaaaaagaaaactatttttttcctccagcaacatatcaagcaaatcaacttgaaatcaaattgagagcatgtagttcatattttccaacatgatagtttagagggaatctagaccaaaaccaaatttgcaaagctctgggtcctttggattcagaactgattgcagtcgcttctctgctagggtcatgtcaggagttggtcagccccagggtattcagtcacatcaggctgcccatgcgctctgtcagccaggcctgggcttcctgagccaaggtggtgctttgggacctggaagaactgagttccctttgaggatgtatttaggaccagatgtgatagaagcatctttcattatccttttaatgaagggactaggattagttgaagcctggggccgtgtccatggggcccatttaacagcaggcaggatcactcaggatttgatgaagaaagttgtattattaatttcttaaatgggtagctagggagcggctgctaattacaatttggacagatgagaagatgaaattggagagatgaaatcatgtacccccggggcaccaaccgaagggagaaggcttgttttcattgaggctgtagaatattaaccacccactatgcagggcacagcaaggaaggccccatgaacagaggtgattttttggagggaagggtgagggggaaccacagttgaccaaaggctctcaaatctggccttgtgtggtgaatggggaggcagggcatggaggccaggtcctgggagcaggagagtgaggtcaccctccagcttcccccaggggcaagcaggtccctccagggagcctccggctgcatgcctgaggctgtggtgtggtgtagtctaactctaaagggtcagatgcctctgaagaactgagagcagggggtgctttaggacagtctgcatgggcttcgagtgaatagtctagattcaaatgaggatgcagtgtggatggagattgccaaatgtattctgttagtggcctgcctcagaccttttcccttctgtatcaacagagacaaggggatatacttgccaccattttggtgaaaatcccaaagcaaaatagatttaagatgctgctgtccccagctggccaaccgatggtttctgagccatgaaatgaaaagattgttcctctgcacattccaacgatgccaccatttctcatctcagcaagtttaaaccccatgtgtataacggtttagagccaacgtgacttctccttctaaaccctcatacttctcttttgttcttcaggcatttagtgtgattgccatgtttaatgtaatgaagttttccattgcaatcttgcccttctccatcaaagcaatggctgaagcgaatgtctctctaaggagaatgaaggtataactaaccctgggtgagtagggaagagagatctcattttggggtgggaaaatgctcagatatgtggaggctgtaccaagctgctggagagctgggtcgcttgttgagttgacattgggaggagggcatccattcagagttagatgaataaatgtgtatgaaggacagagcaggcagagttttataggttgtctgtaggaatgacgagataatctctgtacatgaagaagatgttcctgatcctctttttcctaaacaatctatacatcctaagtgttccacaagtgaggttggttttgttctgagtcatccccactttacctagtttgttctttaatgggcatggtgatggaagtgatgaagaggatgttggggtccctacatttatgcactcatttagtccctttattcattcatttattcactcatcaaagatttactttgtgcctcctatatataagacatgggaaatgcaaatataaggaagagagaggctttatcctcaagagcctctgttccagtgtgggacccaggcactctaagaatttctatacatgataaggatataattgacatttgagaagggcaaataaagtggtttgaaagttcaactgaggagaggaaagggaagaagggcatttgtgtcaacacgaaagcttgttcaaacatctatgaattgattgaatgatcttactcacccgagtcagaaatccagaagtcatcgtaagcatcctgattcatgcactcctcttttcccttaccatacacatccaaccagtcaagaaccctgttaagtcaactcctgattatggtattctctccattttaaggggtgccattgtaagattggattggaaggtacactgttgagttatcagtctttgaacaaacataaggacaccatcacattaattgcatgtattatgatatcagataaaaaagtaaaggtgctccttagactagataaaggatggcatttcttgactcctcaaccttcgctctgtccctactgccattgccttcagttgaggcttccattatctctcatctgattagcgcagtgatttatgaactaacctttctttttctaacattcttctcaagtccgtatagcactcaaccccaagagagctgtcaaaatattggtatgattaccaatacttattctcagctgctcaaaatccttgaacccttgtcccctccaggctctccagctgtgggttctcagttttgtgtccccttcccttcccaacttgagctctgtgcctcagtaatcctgaattgcttgtttcatgctaccaccccaacaaaccatggctttgcatgctccttgcctttgtccatgctgggccttcaggtagaatgctgtcattctctttcccttttctcatctctgcctgtacaacacctgtacagacccagctctagcaccaagtgcatggacctcgagaatgagagccaagtgtcccttctctggcagtcacagtgctttgtcctcatcacattttgcagaaacgatccgtgcatgttctcatctccctccagactgtaatctcttcaaggacaggaactgtgtcttatttatatttgcatttctgctgtttaccccaaagtctggcacatggttagggcttagcaaatgctttgttgaactgggctgagtggcctcggaagaggacacagcagagactgagcatatgaccttgatttcataagcatttagtgccaagcagtgaagtccactgcccaaagactggtaagaccgactgtcttgggcacaagggtgaaatgtggctgggatcagcattctccagtgtgggtgacccacataggccttgtggttaaagaggcaactgtcccagatagcatgagctagtggactatttctgctgcagcttctcctgggggaataatttcagaacctctttcctggatgtggtgggttagaatagccaaaattgtgatttggggtcattagaagatacattgggatgattcttgcaaatggatgacatctgctcagttaattttgtctctttaatcttagaaaattctcatagataaaagccccccatcttacatcacccaaccagaagacccagatactgtcttgcttttagcaaatgccaccttgacatgggagcatgaagccagcaggaaaagtaccccaaagaaattgcagaaccagaaaaggcatttatgcaagaaacagaggtcagaggcatacagtgagaggagtccaccagccaagggagccactggcccagaggagcaaagtgacagcctcaaatcggttctgcacagcataagctttgtggtgagaaaggtgggtgtgtgttgcacaggtgtggcctccagccctcctccttgcattacatagctacagccttctccaggtctgatacagttcagttagagctgaaggtggtgatgggatgtctctaaccagagtccctgtatttttcccccagttttaaaactatgtacatgaacattggaggccccctctccaagtgtggagaagacggtggttatattcattctgatttgcagtacttctcttagagtcagttgcagttttgaatgaacagtccactccaggtggctaggcttgaactgactaggtttcataaatcttttttgatttgttctctttttgtgtgtgtgagacagggtcttactcttttgcccaggctggagtgcagtggtgcaatcagaactcactgcggcctcaaactcctgggctcaagtgatcctcctgcctcagcctcccaagtagctggtactacaagcatatatcaccatgcccggataattttttaaaattttttatttaccaggggaaagcgggataatttttaaattaaattttattttattttttgtagagatggggtcttgctatgtttcctaggccaggctcgaactcctggcctcaagtgattctcctgtcttggcctcctgggtcaagtgctgagattacaggcatgaaccactgctcctgtcctagatatgttcttaatttcacattggaatattatgatagatgataatgactgataattttgaacactactatttaccaggtacataataaactcacttaaccacttcaataaccaggcatcataactgcccctacttgatggttgaggagcctaaggcacaagagggttaaatagcttgcccaaggtcacatagctagcaagtggcagaggagggtttcatacccagggcacctggctgcagagtctgggctcttaaccaccggcaaaaactcctcttgtaaaaagcaaactgagataacaagcaacccagccaagggctaagccagccaagccagccagagtctgtttgttgttctctcccctcaagattgggggatggagatttcaggcaacgctgtgggtttagggaatgtttggcctcttcctgcatctcctgcatgcatctccttcttgctctgggaactcagcagcagactcccagggtggcagtgttgattttgctgcagagggctcaacattaatcttgtgcctggtattttaatctctcatcctgttgactcactctttccctgtgcaagcgctatagaaggagaggttcttatttattatgcaatgtcaagctcaatagctggtgtgagagtggtacctctcatagctaacaaagctgtctgccacgtattcattggaaacgatatttagttggctgagtgcaattgagctcagatttcagctaagtcccatgagtgccacctactttgccttctcgccactctccccgtggagcacctgacttccccccgccctgccttcccatgtgcctccaagaggcctccgtgaacttcccgtgttctaaggacgctgctttctggccacgcaatggctttgctaatgtgctattccatatgtcggtgactctggaattcctgcctcaaggatgcagtcaatgttttgtggaataaattgaagataaagtgggggcaatgcattgttgcctctggagcagtgggggcaatgcaatgcctctggagcctgagggaccccagttccaggcccagccacttcctagctgcttgaccttggatgtcttgctgaagctccctaagcctctgtttctttaccagcaccatgcatttcatagaagtacccatttcacaaggtggtgggggaactcagataccacataaaaatgctaagcccatagtaagtcttagctgatgttaggtatgattgttgcctttttctttaacaattatgtccagcttaagtgctgccctcaagtgttctacagggcatccaggtttttccaagtttagctcctcaattccatcagactggatcctccatggggtcagggttttttgttcacagttatgtcgttatcccgaagcccagctcctggcttggaggtggccagcagtgtttgttgggagaatcatcagaggatacaggcctcatggattttctgctaaagacaaggatgaatctagaaggcttcttacttggccccaagaagtggataggactcaaagggcagccaaatacctggtgaggctgcatcacatctgcggtctctttaatgccccggttcattgaagtccttttaggggaattaaatagattcagcttcatttcatgaggcaggaattccagagtcactgacatatggaatagccattagcaaagtcattgtgtggccagaaagtccttagaacacaggaagttcacggaggcctcttggaggcaaatgggaatgcagcatgggggaagtcaggtgctccaccgggagagtggcgagaaggcaaagtaggtggcactcagtgggacttaactgaaatctgaactcagttgcactcagccaaccaaatttacatccatgtgggctccacaaaggcagggagacctctgtgtggatcactattttatcccaaggtgcctgggattcagcaaagaccttgtttaaggaattattgatgacaggcagcgactctcatgtgctgagaatggcagacaggggatgggcgtttctggtctagcttggggtgggaaaaaagccatatttggccccatgttgggcatctttgccctaagggattgcagggagcaggcctacatgagaatgttctcagatgctccaagtgcagtattgcaatatctgcttgaacatgagtggacatgcttacacgtcagtctccacatgggctgtttgcctgcaatgattctccccagataccccatggcacccttcctcacctccttcacgtcttacccaaatgtcacctgtggcagatgttgtccctgcccatgtgccctggacctctaagtgtttcctggccatcttacaactgccttatctgcatccgtgcccaagggctctgcacacctccataaagaccttcacagactagagagcagccctcaaacaatgactgctggggcatcaataccccacctcctctgccattgggtgggacaaagctatagtcagttccccagagtttcctgcagtttccctgcagggttgagttccgtttgcctcctgtgtaggatattctgttagggagccaacccaataggctgccctttatgggccaccttccctttcctgtatcacttctcctcttccctactggaatttcctgcaccttccaaatgtgagtgtgactttcattcaaatccttgattcaaggtctgtttctgggaaaactcaagctaagacatctacctttccagtaaggctttccttgtacccccaagcctctagcccactccctgtcccttccctgtctcttccctgctttatttttctccatggcaagcatagatgtgcctgccccacatttcatttgcttgtcttgcttcctgtccatcttcccctgactacaaggtaagttctatgagggtagactcaggccattgcctgttgtgttcattgctgttcttgctggtggttggaacagtgcttggcacatagcaggctctgataatgatttgttggttgaattaataaatctggagctgtagaatgttagaatagtgtaacttctcagtaattccagatttttgaaaagcccctagatgtccatacttcaaaagctaccctagtccccctgggttgtacagccttttgcatcccattagatttgcttttctggagtctgggcacagaatagccttcctgttcaaggcctgtgtctcccagaccagcacaaggctgtttcacaccagtgatcttacgtgatttctagaagccctgtgggtgcttggctatgccacacaagggaaagcacttaattaagacttacattcctgcatcctcccaggctgtttatgtgggccagggtggtgtggctgcagctgccatgccccagagcctgcagtgaccccttgttctccgcctggcctgaccagcatagtttgggagtggcacctttgggccagaccctctaagaagtgggagagagtgactgtgtcccatctctgtttctctggcaggggaagatcttgggaatatgtgggaatgtgggaagtggaaagagctccctccttgcagctctcctaggacaggtaagctgtgtgatgagtgctgtgaagatggaacattaacatgacaatgaaatggctcccttccggtcaggcgtggacccagcagatggcctcggctgcactggacactgtgcatgtggttcacaataatttttgggaggttaatgcacgcagcagctccaggcccctgggccagatgaggctgagtttttcacaaactcttgagtttgccaatgaggaggtctattgaatggcattgcctccttgcctaaagctccatcttggtcaaaggagagatgggtccttaaacccatggttatccccatgagttgggctgccctgatttaaaaatgccagcaaggcagcttggtgtggaaggactttggagtctggagctcatggtgactatagatgtattttatgcctgaactaaagcagctcatgcccccaccttctctgcaaaccttggggtaggaagagggaggggacttgggtcattgtcccttccctgctccttctagttgggtgaccccagggaaaatggctaagccatttgtagttttcacaaacctctatgttgccacggtttctaagtcacatcccacatgaatgagaagctttgtggaaaaaaaatgctaagtcctctttctccccactctgctgttgctaaagagaagtttgtgcagctgggattgcctctttcaggaagaggtcggggtacttctgaagaagtggggactccagaatagggtggtggggggatgtgtcttatgagttttaatatgagtgacttcttttggcctcagttgactcatctatagaaagaatgacaactccttccctgcctggaggtggaggtgggggctgaattggatgagttcctgaggtcacccacgctctgagagtgtgtgcctccatgatgagtcagcgtgagccatagaggtgactcagctcaattccccacataatgatgtgaatactcttaatagcatcctactgcataagagatggcccaactgctcggatagctccagtgatgggaagctcatcatgtcacagccagttccttctttggagagttttgatgtatattggagtgaaatttgcctccttttaatttctgtcctttggaaattttgagataacattaagtctatctcccatgagacagtggtgggatcaggcccctggctgtggtcactggggaagcaggggggcactctggacagcctgggttccccagctgtttctgccacatgctcactatttagccttgggcaggtaacttaacctctctgagcctcatgaaaccacttggtttccttgtctgtaaaatgggactaaggagagttgtggtgaggtttgaatgagatcatgtaagcaatagttggctataggataatttgcaaggccagtcatggtgaaaaacattgaacatacatttaattcagttcacggaatataccctacacattaaaaatactacaattattattgttattatcatggtctcttctccaaattgaattctctgtccattgcacaactcctgaggtgaagtggcatcacatccttcggccgccttggtgactctccttctttgcccctggacccactgccactgccccgtgagcatcagccctgagcactgtggcctgccccacatgtaccctctgttgataactttgaacgttgcatccccgctgtctaccattgtctattggatgcccacgatgaggggtcatcttaaatgaacatatgtactcagggtcacaaactggagcccatgcatagttttaattgattgctgaatgctttaaaagtccaaagatgtcatataaaactggatctttgactcctctggacaaattagaaaatcctgctccatcaggcctgcatccttgcatggcaccaaagatgcaactgagtcaaggctgcttcctgaagatggggtgtgccaaggccaacacccacagccgtgcaggtggtgccctgctcccagggcctggctgagcagggttggatccagccagtgcacctggaggaaggggagcctcttgtgaagagtctgttcagagaacatcctgttgtagttgggcccaggtgccatgtgcactgggagcagccctgcagtccaagctctcccatttgtagcagagcttaccactgcctcttttcaagcattccctgcctggccctgtgcaggtgtttgactctgagattctgcatctgcatggttgggctttctggtgcatggacaagatgtcctgtcaacgcttttgtgccttcataaccaatgcttgtggaatatgtgggtgccagggtgcaatgggcatttgaggaaaagttctcaaggcttggctcctgaagcttctcccgtcttgttgttccagatgcagctgcagaaaggggtggtggcagtcaatggaactttggcctacgtttcacagcaggcatggatctttcatggaaatgtgagagaaaacatactctttggagaaaagtatgatcaccaaaggtaatattaacttttaaagcaggaggcacatttgtgtttggtacacactctcctacagatgctgatgctgttggtaatgactgctaagtgggttctgagtttaatgaattctgattaaacattcatcagatccacacagacactggttttcctcttcctgagccaagcgttcaggagaggcgacttctgcagacctgcgactgcacactgggaagaggatagaatcggcacttcattcccagggcagaggagcatatgttccgaggttctctgcaacagggcatatgtggtctgactagagaaaagtgaatccagcaattttgctttaggctgagtacccaaaactgctcagaatcatgagcaagtatgtaatgaatcagccctgacattattaattgacatcagagctatcaggatatattatcactgttagtgtcctcagaatggtctaactaaataaaaacaaagctcaacttataattacttgatttactttgagccatcatcttttttatatcattttattttttaaatggacataattacatttatctatggggtacacttttgtgttttgatatatgacgctgggggagaggggagtgtggggaaaggatagatgttgaccaaagggtacaaagtttcaattagacaggagaaataggcgttagtgatctattgcacagaatggtgacaatgataaattttaatgtattatatatttcaaaagtactgaaatagtatattgtaaatgttttcaacacgaaaattgcgagtatgtatttgtaataactgtagtatgtaatgaacagacagcaatttggggagaaatattttctctaagaacatttaataacccattagctgggcgcagtggctcacgcctgtaatcccagaactttgggagtccgaggcaggtggatcatgaggtcaggggtttgagaccagcctgaccaacatggtgaaaccctgtctctactaaaaatacaaaaattagctgggcgtggtggtgggcacctgtaatcccagctactcaggaggctgaggcaggagaattgcttgaacccgggaggtggaggttgcagtgagccgagatcatgccactgcactccagcctgggcaaaagagcgagactccttctcaaaaaaaaaaaaaaacaaaaaactcattaataccgtgatcaccgtggacatttctatagttattctctccctacttctgaaatgtttgagttttctaaattttaattttaacattagattcagggggtacagttttgttacaggggtatatagtgtgatgctgaggtttgggtttctactgatcctgttcactctctgttggacatagtacccaataggaagctgttcatccgtgcgccctctcatcctccatccttttggaattcccactgcctcttgttgccatctttatgtctgtgcatacccaaggtttagctcccatgtataaatgagaacatgtgatatttggttttctgtttctgtgtgaatttacttaagataatgaagtccagctgcctcatgttgctacatgattttgttcttttttacggctgcatagtattctatggtgtatatataccacattttctttatccaattcaccattgattggaccatcatctttaagctctggaaagtaatggcttcctatggttctttgcttagcttggtgtattgccacgtacattctctcatttgagtcccttaaccacccatttagagagattgtggcattatatccccattttacagataaataaaagggcctagagaggcgagttgaccctcccaaggtattaaatgctattaaatgtcagagttgagtcttggacttagacgttgagctccagatcaacatcagttttctggagctggaggtgcctgacagctgggtcactcagaaaccttcccaggcatcacaatgcttaattaagagaactggagttggttttaggaatctggctgtcagctctccagtggtagtttggcctttctcatcttacccaccaactctgtccctgctggctggtatggcagcatgtatgttctcatcaagaggcttgtcaattcacctcctcttccccggccatgccgtcctgtggccaggaggctcaggtgtggcaggaaggtgatcagtgcaggagtcagtgatcagtatagccaaattactctgctcagcatctcttggcctgtgccacccacctggaatgccttctctgtctgtggatgcggactggacagagggttgccttattcatcaaaatgatgttcagagggcaaatatgtgccaaatgcctgcagcatgcagggcacatggggaaagagatggctcaggtgtatctttgcccttaagatgctcaagtctggaatgggctataagaaatgcacagaaatgacagtgcaccagggaggaatgagccaggtggcagtagaccgtgctcggattgttccaaggcagcagagatcacgagaggatggtggatcagggaagagaagatggcacttgaattgggctttgaaagatggatctagcatccttcatatgtggcatatttagcagagattttgctcctagggcagaaactgtggctctcagggccataggaagcaggagggtgggaggaaattgaaggtgggaggtgttgaggggaggaagatgtgctgcgcagtctgagtcagattggcaaatgtagtaatagcaattatagcccccactgatggagaatttgccatgcagcagacactgtgctaatggcttcacatgtttttctgctccattctcacaacaacccaatgagaattagttgtttgcacaattttatagagcagagagtgaggatcagggaggtacagtcacttgtccaaggtcgcccagctggattcaaaccattctctgattccaaggcccctcatcataactgctatgtacaccaaccccaaagtttgtgtgtgggcatgatgcttgggctgtgcccaggttctgttttggggcctgtgtgcaaccggaagggcagctgctcatgcctgccactctctttcttgcctctttattgggaaggtctgtcttttgatgtctgagttgtgaggcctgcccattgttactcgctgaaggaaagagggtcctgatgacgataatgccaatgatatcaatcaatcaattctgtcatcaaccaaccaatcagccactgtggaggcaggcaacctgctgagcaggacagaaacctaaaggcccagtggtgctgctcagcagctgctgggagggagcacaaacctgagccaggcactgcaggcatcctgagcaggagttgggtccccaaggcggctgtgcgggggctctgtgatgcctggggaaggttctgcttatggtgggggctgtatgagtgaggttgagttgcagagaaaaccgagggaggagggtgtgggcatctgtcataacatggggacgacatcccagtgaccacggacgttcctaggttcctcggtgccagaaggccccaaaggcctcccctggggcagagcggggtcatgcccctggggaccgctgtggggctgaccccacagctttgctgctttttgcaggatagggcgctagtcctggcggcttggctgccgcagagctggctagggcctcggctgtcaaactccccaaagcctgggctgcagggctaggcagagcgtgacgctgagggggcacagtggagaggccaagaggcccaaagagcaggagtcccactctctctcccattccgccccctcacctcaggtgccattcccttcgactcagtatcccgagttgttgcaggggagaaaactccattctctccaacctactagcagtgaggggtggatggagtagctttgtggaggggctgggcaaatgtcaaggtcgtcactggtgatcacccagccccctgctgttagcctccttcacacacaccctctcttccacccacggtcctgcttcagccctgtgacccccaggaggccatccccagtaactgcagcccccaagggtgacccctcctctgactcccatgagcgtccagcaggtggcgccctcagtgtttcctgcagggctttcctgttcagcgttgtcttcttccctgcttggcgaaaaccctgccagggaaggggccattcctgaatcaactctgcatcaggtcaggggaggggccagtggtcactgggacgctacccttgggtcattgaaggcagagcgactggccagggagccttggacatagcagccgccacccctggccttgccccagcaacaccagcagcgcctgtggaagcagcccagggcagcagtgcttggggtctttctcacccagctacttctgagctttgcaccaacaggtatcagcacacagtccgcgtctgtggcctccagaaggacctgagcaacctcccctatggagacctgactgaggtgagcggggctgggagcgcaagcccactgtagctgcacacagtacatttgctcaggtccaaagggctgaggccagcaagcccctgttccacatccagatgccccaaggacgtgtgggcaaagctcaggttccacccattctgaattcttcctctggatctatacttgctggatgtcatagtggacgtggcaccaagcttactggtgtttggcacagtgtagtcacttcttggggctactcccaatctgcctgtcgtctcaggaagggtttctggtgaaaactgcttcctcatcccaagggctggctctgtcctgcaaaccagggccccttcttgcctcactggctctgcccaggccaggagtatgggggtcacctctaaacattgccccctggggtgcttgtccaaacgggctgagcctgccaccccatcctgggctgagcctgccaccccaagagacccaggggagtcaccttgccatctcgggtccccacccttcttgtgctctctgcacaatcttcctcaccttgcccaggagccccagaggagatcagaaggctaaagctttctgaggaaaggcagtttggggtgtctttctctactggtgccctcagtctgcatccccaaggaagtggccgtgaagccttcctggcctgcatctgagacctcccacactgcagccctggttcacccttccaggccatgctcctacctgcctgccaaagtgtccactcacttcctagcctctaagtctctgctcctgtgacatcactatcctttgagtttcaacccaaaatctgcctcctcaaggaaggctttcccaagtcccaccacctgaataatttgccacaaagtactctactgatgctcttcagcaggcgcttgtgaaattctgcttgctgctgctattatgtacataactaccctgcccaccgtggagctccccagggagaggggacttctcttgtccagcttgtgtgtcccgccccgtgcctaactcaacatctggctgaacacctggggttcactttgggttccattggatagaatcacctacagcaagcaatcatcctttccataaatatttactgagcacctattctgtgcccagcatggtgccaggccttagggtggtgatgatgaaccaggaagtcaaggcttatctctccacagtgcttagagttgcctagggatgggatagttgctctacaagtaaacaaaatagggaactcgcttttccatctgcacccagccacgtttccctctggttcactgctgcattctccccagctctctgctcacacaattccctttggtgataaaaatgacgtagcccctccctgtgggatctgcattgggctggggtcttgtgagatgggcacccctcaatcctcatgggaaagagctttgccctcgttgccgctgcccactgggcttcctggagaggtagacaagtggagcacttccactcaccacagagtctcgtgtgaccgggggccctgtaaggggcggaggaacttggatatggcgaggatcagtgtgtacgtctttcccctgagtcctgagaagctccaggaagcttccattgcccaagaacttcagggtgggctgacaatgggcagtagcattgtccctgtccacagattggggagcggggcctcaacctctctggggggcagaggcagaggattagcctggcccgcgctgtctactccgaccgtcagctctacctgctggacgaccccctgtcggccgtggacgcccacgtggggaagcacgtctttgaggagtgcattaagaagacgctcaggggaaagacagtcgtcctggtgacccaccagctacaggtgatgggacatgcaggatccaggaggtcacgggatgggtgtggctggggatctgatgctcacagagcctcctcttctgcctatatctgcctgtcttcagctgggaatgtggggagggagccagggatgcaagagacactcatgattccccagccttcctggctcccaggaggcccacctcttccactccatgcatggcctcagtggggccaagacttttcctgcaccagagggtagattctctagaagcaattgagtcctgcctgtgggtggattggggcacccttccccaagttctgggcgcctggtaagatggggagccagggaaaacaatgacggccccacccttactccagcaattctgggcaagcctgaggccagggataccttgactgggggtgtcagggggtggtagacctcttggatgaggggcccagatgccccaggtatcacaccccaggggaaaggggcttgaagccaggactttgggactaaggctgaggctttggggaagctctctctgctcagggccactgtctcaggctaaggagcatgaatctcactgaagaaagcgactgggcttgacctcagtgaatttaagaatttggcagagtgggaacagccctcactgcattggtctcacataaggcgtcctgattgcctgatgggaatccaagaacctcctcctcccaggccaggtttccctgcttccagaccatctccctctctcttctttgtagggaatccccagagatgtgtgggggaagggggggcagtgcatgtgtgtgcacgtgtgtgttcatgcgtgcacgtgggtgtctccttgcccgacgagagattccttgggattgacttatgttgaaaggcctattggagcaggagagcaagtgtcccgtcttctttactctcctgctacctgcagagaacatgttacataagggcctggtctgggggcaggaagcaggtctttgcaaaggtaagtcaagctggggtggagagggaggggcaatagcagcaaataaagttgccatggctataggatgctgcagccagcattttaggaccctccagtagtggccaggaggaccagcctaaagagggtgttcctcgaagaccctgtaaaaccaagctttcccattgctgtgatgctgcccctagcctgagctcacctttgcccagggctagagttctggtcccggaataagctccaggcatccgaattttgcgcatggggattgtctggatttcctctgagtgggcctgagcacctccaggaagcatcatgctgggctggtgtgggcaagagctcctagttcttcttctggcctagttcttcttctgagttaggatggaggacaaggttggatttcttcaagaccctcatgaggtgacagaatgggctctggcccagtctggatgctaaacctggcagccctagctctgcacctggaatatccctggagacaccctgcagcagggagggctgtcctccaagggctctggggatctggagggggatgcctcatccctgacagatgtgggtcatggctgtccctccaggagtcctcatgaggggaatcataaccttggtcctggttcggtctttgaaactgactgagccgcagtatgacctcaggcaggagccatcttcacaccaggtccatctccttagattccaccttcccgtgtcattttatccaactttttgcaagttggaagaggcaggtagccaccaggtggcacaagatcttggtcctgctgtgccttgtcagggagaatggaacttagagccccagaactgcggcccggggcttttccagagcctatcccctctgctcttactcccaggcccacaggcaagcatcttagtggttggggtggatgatcgctcttctaaggaaaccactgaaatccaacccaggtgcagatttggtgacggcttgcagaacaaagctgctcaaatctgcctcatatctctggagtgaactgggggcttgctgaccagagggggcttccccgggagctcctggagctggagcgtgtgctgtggctatgggactggaacaggcttatggtgtctcagtttccccatctgaaaaatcagctgataagacagggagctgggcagttagtgggagggaggcatgagggctggagctgtccaagctgttagaactgttatcattcagcctttgggcaccctcccaactcgcccaatcaagtgtacaatgaccgaacacagctacttctttcaggcttgtaatcaagagcagcagaggttgatttgaccttggatgaaccgtgcagtatcagggaagacctctggcccatactgcaaaggcttctttcggtcaaaccatctttagtctcagcatcttgcccacctctaggagggagcttccttgatcctggggggagagctctgtgtctcattccaaaatgaaaggaaaaccctcttagcagaactctttgatctcaggaatgatatggaaatgaagggaattcaaattaaaaaaaacagaagtgctttgggcaaaatgtgggatgccagcattaaatgtagctgtgtttttatctcatagataaagctggcataaattcctcaggccagggaatgtggcctcttgcctggagaccacaccgtggtctgcttctcctgggctaaatggggatgatgagggaggcttgtaattttagaacacaggaggaccttcgtgaagatcatatttcccctccctaccaagtcctggctgctgtgactgtcagttttattttccaaatctccatgatcagatttcgatttatttatttaatttttttgagacagagtcttgctctgtcatccaggctggagtgcagtggcaccttcttggctcactgcaacctccacctcctgagttcaagcgattctcctgcctcaacctcctgagtagctggattataggtgcacgccaccatacccagctactttttgtatttttagtagagatggggtttcaccatgttggccaggtgggtctcgaactcctgaccttaggtgatccacccgcttcagcctcccaaagtgccgggactacaggtgtgagccactgcgcctggccatgatcagatttcttaggaaggcagctcatttaaggagcagtagcaaaggaagattcagtgttctttactgtgagagccaaaggctggcttttttttggactcatgagacctgtgggtactagatgaatggttctgtgctgggggccaatctgcccccaggaggcacttggcaatgtctggagacatcattgcttgtcacacctccaggagggggtgctaccgacatctagtggggtagaggccagggagggtggtaaatatcctacaatgcacaggacagccccctcaaacaaagaatgatctggcccctaaagtcaacagtggtaactaaggttggagaggagtttggcatgggctctcctttccaggcagaagttcattgtcgatcacttacttctgcagttcttagagtcttgtgatgaagttattttattagaagatggagagatttgtgaaaagggaacccacaaggagttaatggaggagagagggcgctatgcaaaactgattcacaacctgcgaggattgcagttcaaggtaactcacacctgggcaggtgtgggaacaattggggcggaatccctcaggatttcgtgcctgggagaggtcctgtcacttagcattcagaaggaatttcattttgtctccaggatcctgaacacctttacaatgcagcaatggtggaagccttcaaggagagccctgctgagagagaggaagatgctggtataatcggttagaatcccatccctgttattgtccttggcttgaatggacacagatctctctttatttctcaccctagttttggctccaggaaatgagaaagatgaaggaaaagaatctgaaacaggctcagaatttgtagacacaaaaggtatttaccacacatcccctcagtcacatacacttaaggatgtattgggcatctaccgtttgggatacagacagtgtagacactgtgcatgtcattttgggcagccagaattggatggtctagggtactgtgtgccttggggttccactgcctaagtccaaattttggctccaccacttactagttttgtgaccttgagcaagatacttggccactctgaaccttagcctcctaatctataaaatgaggaagtagtaccaaccacaatttcttgtaaagattaaatgagaaaatgaacataaaatgattcgcacactgcctgacacacagtgatgctcaatagttattatgagctggagagatcaaagtactgcatggggattcgttagaggcaaaggcagacacggagcttcccactctttatggggagcattgagaacggattatgaagcagtgaagggattgaggtgggataaggttattattctttcaacaaataaaggttaagcattgactgtgtgcctagtagtactaaactgggctgaggagagtaagaagagatgcccgtgttctcaggatcttgtggtctggaggggactcaggcagatgggtaactatgggaaaccagtaagagtaatggggaatttgggtgagagaaacaaacatgtcagggaggccttcacagagggggtggccttcggactggtccctcaaggttgtataggagtttgctggggacactgtggtgagaaggtgggagagggtagagggcttgaggttgagggtaggaggagattccagggaggtggggagacgagatgtggaagatgagcctggtgggggctacctggtcaggccacctcttctcctccatagacaccctgccttcattcactccacatccctagagcacctactctgccccttgccccatgctggacacagagaggactgaggtcaatagtcctcaaagtatacacagcaaggtggctttccaagttattctgttcctcaataatgcatagccaaaaaaaaaacttcgcacatttcatcaaatttaagatgccatccatttttaaaggctaccaccattttacctaccacttggaaagaaaaaaaaatctctgctaactaaacgatatgacatactagcaaatggaaggcacatccagattccagagatgttacaatgtgggggaaagaagtgagccttcgaatcgatgagatctggcatcctcaatggtgcttgtgacaaatgcacgcacatttggaaaggcaacatagttttacagttccagaggcttccagggctgaagtacccagatatctcttctgtgctttttggagaaaccttcaggctgcccgggatttggggtcccgtggagagagtaatctctgctcctcacttcctcatcactcacccctctctggagaggaaagtgtaattgtgaaatttcatgctggagagagacctagtcctcaaggataaacaacggggctgtcaagggcggtgaaagctggaggaagggaagactcgtgaactggttaaagacaacactgcccacctgcctggcatcacagcatcttctaaggcacagccgaggcaaacagagcatcagcggcactcctgccccagcctgcgggctgcgagggaatgtgaccagtcccttttgtgctcctggatgctgttcattaggctctgctcacacgctgaggcgtctccctcattttgcagtttcagagggagacacaatgggctgaagtcaggctgaacattttcaaaggagctccaggttcccaggcagcgagtataatggtggctctattcagcaaggtgcctttgaggcgtgaaagcttttcctgttgggccagagtgcacagtctgtatgtggggtgccccctcttctaactctatttatctctgtttataaaagccaagtacggtgtataattctgctttggagtcgacattttcgcatttctctgtggaggagcggaagagacatgcattcagtactggctgctaggagctgctttatccagcatcccttttcctccaaaatcttgtttccatgagaacttgacagtcattttcccttccccttggggaatggaagaacctgggacagacattgagggaatcaggtgtccatgcagcagctgacctagggggatacgctggttttcttctgtatggcatgagctctgagaacacaggacctgcctctttcttgctcactctgtagcagatgacaagggtgcctttaccacttcagcatgcccagccccctcccaaatgccatctctgcattcctttgcctgggggctctttctgggagatgccagctaatgtcaagctggaagtacgggaattaacacccccatccagggagcggccttcaccccaaggccaataggaatcagtacagaaaaatcccagatccctctcatcacgtgaaaaagccctgagtgtgtgcctacactggttctgagatttttcacatgggatgaagccccagtggcccacagtggtcgccagcttggtgacacaccttactccctttagctcccaaataaacctcatgtattcatagtctcttcttgggtgctgcttctaggagaaatacaccaagacaatccttgcatcctcaggactgaccatatagtaggtgcttaataaatatttctcaagagaccagaagcttacttcacagggctgtactgaagaccgagtagcacaaaatgagcaaaagtgtgttggaagtgcatttgagagcatgggacgagtggaaggatgcatcacagcccccttagccgtgttgtggagtctgtggaggggccgtgcctacctcgctgggcccccaccccagtggtgagagccatggcacttgtgtttgtctccacagttcctgagcaccagctcatccagactgaatccccccaggaaggaaccgtgacctggaaaacatatcacacgtacattaaggcttctggaggttcagtataaaacaacaagtttcttgatttaatttgcattttaaaaatcctgtcttaaactgttgggttcacgttttatgatttctttaacaattattctgtttatgctagggccatttatcaatgcttttattttttcccctcctaaaaactaacgtctgataatacagccttttaaatggaatcattctttatctccattaaagctgccagactctcttttattggagtggagtgagcagcagcatgaaccctacccttgcactccagttgctctgtacagcagtggccagtccattgccagccttccataaaagatgctcatctcagtgtgcaaaacatgcctgtagtttcactctctgtctctctccagcaagactgggttttccttggtttctttttctttctttctttctttccttttttttttgaaatggagtcttgctctgtcacccaggctggagtgcaatggtgcaatctcggctgactgcaacctccaacctctgcctcccaggttcaagcaattctcctgcctcagcctcccaagtagctgggattacaggcacccgccactatgcctggctaattttcctatttttagtagagacgaggtttcaccatgttggccaggctagtctcgaactcctgacctcaggtgatccgcctgcctcagcttcccaaagtgctgggattacaggcgtgaaccaccatgcccgaccttccttggcttcttttaaaagaatattgagtcacttctattgaagtgcacattggtggtttttccaatatgttcactgtttggagccattttccaaccaggtagaacagatgtccccacagttcagggtcccaacactcagatgtgctgcatcagtctagcaggtggtttccaggcgtgggagtccttttcctgcaggttttgaatttcccatcagggttgggtcctgaggaaggtcagcccctgccatgtgctcatgtctgcagccccttgggcctctccgctcctcttgcagggtacctcctttctctcttcactgtgttcctcttcctcctgatgattggcagcgctgccttcagcaactggtggctgggtctctggttggacaagggctcacgggtgagtttccctttggcattggaagatgccgagtctgtgtcttggagtaaaactctgctgccagagcatctgactgcccctgccaccatgccatgagcccacatgcatccctctgcccttttcaagaagtgggagtcagatgcttacaccacaggacccaaacccctggaatcccctttgatttttcaagacaagcagggtatagacaccactttcagattttaaagggttgactaaagaagactgtgccccagcttgtctggaatcaggcacgtacaagattgggtcagtttcac

SEQ ID NO: 2232 - protein, 570 aa, Homo sapiens
MLLFFHHRFRVLWDEEVARVGPEKASLSHVVWKFQRTRVLMDIVANILCIIMAAIGPTVLIHQILQQTERTSGKVWVGIGLCIALFATEFTKVFFWALAWAINYRTAIRLKVALSTLVFENLVSFKTLTHISVGEVLNILSSDSYSLFEAALFCPLPATIPILMVFCAAYAFFILGPTALIGISVYVIFIPVQMFMAKLNSAFRRSAILVTDKRVQTMNEFLTCIRLIKMYAWEKSFTNTIQDIRRRERKLLEKAGFVQSGNSALAPIVSTIAIVLTLSCHILLRRKLTAPVMQLQKGVVAVNGTLAYVSQQAWIFHGNGRGQWSLGRYPWVIEGRATGQGALDIAAATPGLAPATPAAPVEAAQGSSAWGLSHPATSELCTNRYQHTVRVCGLQKDLSNLPYGDLTEIGERGLNLSGGQRQRISLARAVYSDRQLYLLDDPLSAVDAHVGKHVFEECIKKTLRGKTVVLVTHQLQDPEHLYNAAMVEAFKESPAEREEDAGIIGYLLSLFTVFLFLLMIGSAAFSNWWLGLWLDKGSRVSFPLALEDAESVSWSKTLLPEHLTAPATMP

SEQ ID NO: 2233 - DNA, 59588 bp, Homo sapiens
  source (1)..(59588)
  CDS (201)..(239)
  CDS (19765)..(20013)
  CDS (22071)..(22222)
  CDS (25670)..(25814)
  CDS (28077)..(28268)
  CDS (30114)..(30265)
  CDS (42934)..(43362)
  CDS (46385)..(46558)
  CDS (48143)..(48221)
  CDS (50255)..(50359)
  CDS (59242)..(59388)
gatggatggatggatgacaatccttactatactcttggttggatagtgatccatcattttggattttagggtgctcagcagaacatcttcaatccagccctcatttcgtcacaggagtgatgaccccgtgggcagtctttggggagagaatgattaccctgaaggcattgaaatggcatccatggagatggcaaactcatatggccactctctgccaggtgctcctggaagtggctatggtaagcatttgttaagccaggatcatatcctgggaaaaaactgaaatcactggatttaggggtgcaatcattaaggagacttggcaataggagaattggtgtatccttccaatctcagagacccttgtttttacatacaaaagttgagaattcagtgtttagagaagccaagttaattgtcatcaattataaaaaaaatgctaggtaagagttgtggaaaatggggacctgtgcactctgttcctaccagagttggtgaagctcagtccatggtggttatgtggcaatgtgggctcaatgtggcaagatcttcatatttttcagaagccgtgtatttggggttttatgtgaaacctgatgttgatctgttccaaaataatttttaaaagtaaaaacagtgagctgggcaaacaaaaccacattttttgttagctgccagtggccacctgtagtttagcatatcctaaaggcattcaggcaatcagcacgtatgtgttcagaacctactgggggaaaagggagttaagaggtagctctgccctcatgttatttaaagcctaaataggtcaacaaaagtgccacatcaagactaaagaaaaggctgggtgtggtggctcacgcctgtaatcccagcacttgggaggtcgaggcgggcagatcacctgaggtcaggagttcgagaccagcctggccaacatggtgaaaccccgtctctactaaaaatacaaaaattagccaggcatagtggagggcacctgtaatgccatactcgggaggctaaggcagaagaatcacttgaacccaggaggcggaggttgcagtgagccaagatcgcaccactgtactccagcctgggcagtagagcgagactctgttaaaaacaaacaaaaaaaagactaaagaaagttagcaagcaaactattaatatttgaaaaatcatgttgtcctcataatttgttgtgtgtatagataagatgcttagctccaggaggcaaaggaaattctaaacagttttttttttttttaagacagtgtcctgctctgtcacccaggctgatcatagctcactgcagcctcaaactcctaggctcaagcaatcctcccacctcagcctacccagtagcagggactacagttgcatgccaccatgcctggcactttttttatgcttgagaaagatggggtcttgctatgttgcctgggctggccttgaactcctggcttcaagcaatcctccagtctcggcctcccaaagtgctgggattacaggcttgagcctgggccaattctgaacagttcttactttctaggaggaaaaagagacatgttccaggaagccgtttgatggcacaagagaaaaaaaaaatccaggccatgttaaaggaatttggaacctgtggaagtcagaaaagggagaaggtgttcagccaataagaagagaacaagagacccaagtgctgggaggtgcagatggaggattgatgagccttgaggagtagatggggcaggtctggaagaaggcagagaggaggggacaggatgcatagccatgtactaatgaaaacactgactgttaacacatagaaaattttcattccgggcctaattttaaaaattagctgggcgtggtggcacacacctggggtcccagctacttgggagattgacacaggaggatcacttgagcctgggaggttgaggctgccgtgagccatgactgtaccactgcactctggcctgagtgacaaagcgagaccctgtcgcaaaaaaagaaaggaccggacaggacaggacaggaaaggaagggagtggaggggaggggaagggaggggaagagttggggggaggtggagggggagagagggaaggaaggaaggaagggaggaaggaaggaaaaagaaaagagaatattcctttgggagcacagacatcagatagcccagggctattccaaacctttattccaagcattcctccacaggggcaatagaaatcccaaggggggaatatctgctcttgaaaggccagaaaaaaatctcactcttgatgtataaagcagggatacacatgtagtacacaaacggatacagtatatctttggtattaaaacttcttagaggacggcaatgaggaaaaaatgtctcccctgcttaaggggctgataatgaaacaagattgagacatactgtgctactccagtgcaagtggaacgtataactgcaagcaaatcttgagtgtttcctatgccctggagtctctgtccagcacttgacttttattatctcatttaatctgtacaactgcctttcaggcaggcactgccactctccctgttttaacagatgggaaaactaagacttagaaagaaatatgcacaaggtcactcacttactaaattgacagagccaggattgaatcccgtctctctacccaaaacctgacctcttatttaccctgcattactgctaggttgaatcagggcaaatacaaacagattcctgaccacaaagctctatagaacattggaagataaaatacttaaaaaacaaaaaaagcaggtcagtatagctcacttctctgggatcttttgtagggcaaagtttgcagcccttggcaatcacttgtccagtgtcaccccatcctgataaagtgttcactccttaaggagaacctgtattcatctatgtaccctccaaggctctaggtgctcttcctagtgtcacagtgcctggcccacagtaggtgcctgaaaaatattaactgagttaataacaacaacaacaacaacaactataagagttgtatcagctagctattgccacaggaatgctgcataacaaacaactccaaaaatccagagtcgtacaataaacaagcattttcttcttacgggtctgcaaggttggttggcatttggctgaactacgctgagtttgttgtgcttggctctacgtcatgggttctatttagttctagtgtccctcttcttggaccagtgagtgacctagggcaatgtcttcccatgccgtaagctgaaagtgctcaaaatggcaagcagaaacacacggtatctttaaaagccttggcttggaactggcacactgtcacttctgtcatattccattgttcaaagcaagtcacacgactaagcccaatatcaatggaggtagtcaaggtaggggaaatgtaatatttgctgaataacaattaatctactataacagttaatatatattagagtttaatatgttcgaggattatttaatcatttcacatgtgttcactgattcaattcccacaacaatcctatgtgaaggtcctattattatccctatttatttatttatttttcagacaaaatgcccgctctttagtgcaggctggagtgcagtggtgcaatctcagctcactgcagcctttacctcctgagtggctgggactacaggcacactactaccatgcccagccaatttttttattttttgtagagacagggttatgccatgttgcccaagctggtctcaaactcctgtgctcaagcgactgtcccactttggcctcccaaagtgccgaaattacaggcatacaccaccacacctagcctgttatccctattttagagactaagatattgaagctcagagatgctaagacacacacccagggggcgcacaactaggaagtaacagggctgggagttgattcccaggcaagaagctccagaaggtcttgcaatgtaattttgcatattgtccccattaaaatgtgctccattttctccatttctcccagctaattgggaggctgaggctggagaatcacttgaacccgggaggcagaggttgcagtgagccgagattgcgtcactgcactccagcctgtgtgacagagcaagtctcaaaaaaaaaaaaaaaaaagagtggactagagtaaggctatgttagagtgcagtttatatagtcaaacaaagtattattttgtaaaacttgcttttcagttctatatgtataggtgtgtcctggatctcagtgcaaccattatttacacacacacgcacacacacacacacacacacacttttttactgggctccatgactcaagcctgtaatcccaaccctttgagaggccaaggctggcagattgtttgagccgcccagaagttcgagaccagcctggataacatggtgaaaccccctctctacaaaaaatacaaaatattagccaggcatggtggtgcatgcttgtagtcccagctactcaggaggctgagatggaaggattgcttgagcctgggaggtcaaagctgcagtgagctgaaatcgcaccactgcactccagcctaggtgacagagtgagaacctgtcttaaaatatatattaatatatatatttaatgtaattttttatattatattttatattaaaatatatatttatagataatatatatattttaatatattatatttatttttatattatataacatataaaatatagattacatgtaacatataaaaataaatatattagaaatacaaaaaatatataaaatatatagtataaaatatatatttatttttatatcatgtagtttatatgtatttttttcttttttttttttttttgagtcagagtctcgctctgttgcccaagctggtgtgcagtggcgcgatctcggctcactgcaagctccacctcctgggttcatgccattctgccccagcctcccgagtagctgggactacaggcgcccgccactacacccggctaatttttttgtatttttttagtagggacggggttagccaggatggtctcgatctcctgacctcgtgatccacctgtctcggcctcccaaagtgctgggattacaggcgtgagccactgtgcccggccacatatacatatatttttagagacagggtctcattatgttgcccaggatggtcttgaacttttgggctcaagtaatcctcccaccatggcttcccaaagcactgggattacaggcgtgagctacctcaccttgccaacaattatttttaactatggcttagtcaaatgaaaaaccattgatctaggctgattatatttaacagcactgtttttgtatttttgtcctagtttccacccaagttcttaatcagtagtctgttagaacctcaaagaccaggtctcagtcttattagccgttacgaaccactattagcacatcataactattgcatgccaggaatgtctagtgtggtgagactaatcggcaatatctccttcctcttccctccagtgaaccctgcttatgtaggtgaaagtggtcctgtccatgcttatggaaacccaccattgtctgaatgtgattggcacaagtcaccccaaggtaagtgatatggtttggctctgtgtccccacccaactctcatttcaaattgtaatccccatgtgtcgggggagagacctggtgggaggtgattggatcatgggggtggtttcccccatgctgttctcatgatattgagggagttcccttgaaatctgatggtttaaaagtgacagcttcccctgcacccactctctctcctgcccccatgtaagatgtgcccttctttcccctatgccttccaccacgtttgtaagtttcctgagaaatgccccccagccatgaggaactgtaagacaattaaacctcttttgtctataaattatgcagtctcaggcagtatttttatagcagtgtgaaaacagactaatacagtaagacttaaaggacagtgaccaaaaagtcaaccctggagaaggaacatgtccaagacaatccacccattgccatttcctttgacctccagtgtggttactgatgcagaacctgcttaacatatcataatggagttttcttttagatgtatagtttgttgtcttctggggatcagggtgtcttcattaggaatcttctggttgcaagtgacagaaacccaactcaaacaggcattagcccagggggaattcattggctcatgtggtagaagcgtatgggggaaacttaaagaaatgaaagtagaagtattagtaccttccagcacctagtacagtgcctggcacgtagtaggtattttagggatatttgttagattaatttgttgaatgagtacagaaatcaggacctcagtctgaggtcagggaactcaatgtcacctggactctggtttcccatccatttctcatctttgtaaaacttgcttttcagttctgtatgtataggtatgtcctggatcctcagcacctctttaagttagacctcattcatctccgtcagagtcaggacttgtccacaggccagagaacacggccaatagcaggcccacgtgagccctctgcttagccacctcattaggaagtcttgcttcctccctgggtccatctctaatgcgggggaaggactctggccagtctaactggagcacatgcctacacttgagccaatcatttttaccacaagggacaagactgggtcacctgtctattctgtggctaatgcctgtgttggtggggacaagatgcattgatcaaagtttttgtgaatattcatataattattatgataatggagtgtggaagcagtcagactggtgaaagatagaaggcgctgcaatcagttaggaagctctctaaggatcactgtgtgtggtgatgaaggttgaatcagaggcagagactgaaaaataaaaaggaagcaacaagccaggcacgggggttatgcctgtaatcccaacactttgggagaccgaggcggtaggattgcttgagcctgggaggttgaggctgcagtgagctgtgatcacgccattgcagtctagcctaggtgacagagtgagaccctgtctcaaaatcaaacaaacaaaaacaaaaaatgaagcaacagaggagagagactagactagggagtgctggagccacaaggcaaatctgtgagcaacaaggaataaagtaatgaggtcctctatacaatgatgcgtgtggagagaagccacttagaactctcacctttcagccccatcgcctataagataaccgttagcctcatccttcaagagatgtatgccttttcagggagggttagatattgctacttggaagggaaaaccgttgggatataaatgatcacactgtctatttggtccccactggggcacagaatggctttaattatcagggagaataaatatgtttaaatgttatgactgctctgtcttgccagcatgaggtttggagactgtatagaaaaaaacacactcagagtgttttttctgttctcttactcaacaaccatcaacacagaaggcttctgtgaacaaatgggtgggggtttctccccacacaccaagaaagcgatcaattttacagcagacatcgctgggtatcctccaattcaattctgacactatctacctggagatagtgtcagatcccataggacaaaggcgcagtccccaagactatatacctccttcagaccccagccacatgtccaggccgccggaactttttctttttattattattattatttttaaggatctcactccgttattcaggctggagtgcagtggcaccatctcagctcactgcaacatccgcctcccaggttcaagcgattcttgtgcctcagcctcctgagtagctggcattacaggcatgcgccaccacacccagctcatttttgtatttttagtagagacggggtttcggcattttggccaggctggtctcaaactcctgacctcaactgatctgcccacctcggcttcccaaagtgctgggattacaggcatgagccaccgcacccagccccagaacttctgaccaaccagcttcaagttggggttcccacgacctcctcctttggtttggttaatttgctggagcagctcacagaacttcgggaaacttatgtttactggcttattacaaagaatattacaagggacatagatgaagagatgcattaggtgaggtataggggaagggacacagagcttccatgccctccctgggtgagccaccctccaggaacctccccgtcttcagctatcagaaagctacctgaacccagtcctcttgggccttttattgggaggcttcattacatagacatgattgacaagcatgtagaaatgagactggatggccgggcatggtggctctcacctgcaatcccagcactttgggaggccgaggcaggtggatcacctaaggtcaggagttcgataccagcctggccaacatggtgaaaccccgtctctactaaaaatacaaaaattagccgggcatggtggcatgtgcctgtagtcccagctacttgggaggctgaggcaggggaatcacttgaactcaggaggcggagaatgcagtgagccgagatcaaagggtgtatgatctcatactaatagacaggttggggaaacccagaaagctgtgtctgttcagatccttcttgggctttctgtgcagcattccttcctccagggtttggggcaggaccccttctgaaatgagggagaatttctttatggccaactccaagacagaaaggtggggaaagactggaatcctgccttggggagaaaatagagcaaatgaaaagaggcaggagatcagagagagagattctgttttctgaggcttaaaattctaacattataacaagggctatggtagttatgagccaggaaccacgggtgggaaaaaattatatatatatattatatatatatatatcacaggaaccctggtagaagaggagtccccaaaaggcagagagtagtaaagaaatagaggaccaaaagatgaacctggctgtcttcatcattttgctttgtgttgaatctgattcacaaaccacatgcaattaaataatagcccaggctgggtgcactggctcacacctgtaatcccaggacttctggaggctgaggcaggtagatcacttgagttcagaggtttaagaacagcctgagcaacacagtgaaaccccatctctatgaaaaatagaaaatttggccaagcatggtagctcatgcttgtaatcccagcactttgggaggcctaggcgggtggatcacttgaggtcaggagtttgagaccagcctgcccaacatggtgaaactccgtctctgctaaaaatacaaaagttagctgggcatggtggtacatgcctgtgatcccagctactcaggaggctcaggctggagaatcacttgaacccgggaggcggaggttgccgtgagctgagatcatgccactgcactccagcctgggcaacagaatgagactctgtctcaaaaaaaaaaaaaagaagaaaaaagaaaaattagccaggcctggtggcgtgcacctgcagtgccagctactctggaggctgagatgggaagatcccttgggcccaggaggcaggcactgcagtgagccaagatcaccctactgcactccagcctaggggacagagtgagaccttgcctaaaaaaggaaagaaagaaaaacaaaagatagcctgataaagtatagctttgatgaattaattatgctgtgtccctaggaagcacctgccacatagtgtgcgtgcttatattcattcatttatgaatgaatattttgagatggaatctcactatattgctccgactgttctcaaattcctgggctcaagcaatcctcccgcctcagcctcccaagtagctgagaatacaggtgtgagccaccacctcagttggcaagaatgaatgaatgatacaccagcatcttttttgttgttgtttttgaggcagagtttcactctgtcccccaggctggagtggagtggagtgacctcggctcactgcaacctctacctcctgagttcaagcaattctccagcctcagcctcccaagcagttgggattacaggcccctgccaccacacctggataatttttgtattttcagtagacagagtttcaccatgttggccaggctggtcttgaactcctggcctcaagtgatccacccaccttggcctcccaaagtgctgtgattagaggcataaaccaccacacctggcaagaatgaatgaatgatataccagcctcttgttacaggaaggggccagagtgaaatgactaagagttctgctttgggttcagagcaatccggatttgaccccagctctactgcttgctggttttgtgacaaattatttcatgaagcatcagttttcttagctataaaatggggttgattttaatatctacttcatagcgtaaatgttgtgctctatttaaagtacttggcctgcagtaatggcaggtatcattactgttaattatcactgttgggagaaggaatacatgggttctagttcaattttgacatttaatgaaagtgtgatgaggaggaacagtgtccgttcagctctctgcacctcaatttctacaactattaaataaacaactaggcctaggtgatttgaaattagatctattggataggaattgtgtttatgtgcctggcactggaacagaaatgtggcttagcaataaaggggtttatttttctcatgtactgagaagtgtgggttaggtgcaatggttcacacctgtaatcccagcactctgggaagccaaggtgggagaattgcttgaaaccaggggttcgagaccagcctggacaacaaagtgagaccctatgtctttaaaaaaaaacaaatagctgggcatggtggtgcccctgtggtcccagatactcaggaggctgaagcaggaggattacttgatcccaggaggtcaaggctgcagtgagttatgatcacactactgcactccagcctgggaaacagagcaagacctcatctctaaaaaaaaaagtttaaaaatttgtacttttttttacatgcggtggctcatgcctgtaatctcagcactttgggaggctgaggcaggcgaatcacttgaggtcaggagttcaaggccagcctggccaacatggtgaaacctcgtctctacaaaaaatacaaaaatttgccaggctactcaggaggctgaggcaggagaattgcctgaacccaggaggcaaaggctgcagtgagccaagatcatgccactgtactccagcctgggcaacagagagagactctgtctctaaataaataaataaataaaaatttttaaaaagcaaaaaaacaagaagcatggagggaggaagtgcaaagtttgtacagcagctccacccatgatgccctcaaggactgaagccccttctgcagcctttttctctaccatccttagcaggtgaacgttcgttctcttcttttcaaaatgtctggaggaagactggtgaagggcaaattgtgaacccaggcaaactgtccccttagaaagagcattcctggaagccacaagtctcattggctaaaactgagtcacaggcccacccttagccgcaaagaacactgggaaactttgagcactatgtctgcacaggaaatggagcttttgctggtgtgagaaagaagaagattagagactgagagccagacaaatagcagagtccactacctaaggcatcaggagataataattgtatcactgtaaacccatgtggatttctacaggcagataaaactacagatataaaatataagttcagccaggtgctgtgtctcacgcctgtaatcccagcactttgggaggccgaggcaggaggatcacgaggtcaggagatcgagaccatcctggctaacgtggtgaaaccccgtctctactaaaaatacaaaaaattagccgggcatggtggcgggcgcctgtaatcccagctacttgggaggctgaggcaggagaatggcgtgaacctgggaggtggaggttacagtgagctgagatcgcgccactgcactccagcctgggtgacatagcgagactccatctcaaaaaaaaaaatatatatatacacacatttagaatatatatatgtatatttagaacatatatatgtatatttagaacatatatatatgtatatatataagttctaggccagaggcactaaattataaaaaaaaatcttgccctttgactatgagtcatttagaaaaatatcttccttctgtttctagaatcccattgtcttaaatgaaagattctgttttcgatttcttgcctagctaccaagacagaattctctgcaggaaaacactccttctcctgagaaaactcctcaggggttagatgcagggagttatgttgtgatttgtgtaggggtggctttggtgagctcatcctggcattttaaaaataatgtgaatggtgtatccctttgtgatcatcatcactttttccctgcgagtcccaatcaatgcgggtgtgactgctgtatgaagtctcaggaagcccaccccagtggagaagaaggcttgcaggaggcaggagatgctgtccgatgaccacgtgaatgaaatcatcatacaggttgagaatgtttcctctggggtccaaagccacccatcctcaaatcagatttttcaagaaaaggtgctgctagactcaagcatcaacatggttttgtcaatatctgacattgatgtgatagactctcagacagtcagcaaaaggaatgaccaaaagggtaaccaggtgctgcggttttcaacatctttgaatgagtcgatgtctcagacccttcatagcctagaatgcatgggcatagacactcctggttcttcacatgaaactgttcaaggtagtgaaatgctggggaagagaagtaggggagtaggaaaaaaggcttcctcgttgtccacagcatattttactttttagatatcaagtggggccaggcgtggtggctcacacctataatcctacggctttgggaggccaagataagaggaacacttgagcccaggtgttcgagactagcctgggcaacaaagggagacctcattgctacaaaaaaatttaaaaaataataaccaggcatgatggtgcacacctgtggtcccagctactcaggaggctaaggtgggaagatcacttgagcctaggagttggaggctgcagcaagctctgatggcaccactgcaacccagcctgggtgacagagtaagatcctgtctctaaaagaaggacattgagtaatatggaagggcggaaggttttgtggttgaactaaggaagccaaggacaaaggaagggatcaatttaagacatccctaacaagagcttatttttatcaagcttattttgtatgccttgtgctctgcagagcacctgctttttgttatccatcgaatttttatgtactccctgcactccacacctttgaggtggcatttccgtttgcttgatgaggaaactgaagctcagataaatttagtgacctggaagatctggggcccaaatacaggtctatctgattcccaagactacattcttttttttttttttttttttttttttttttttttgagacaaagtcttgctgtcacccaggctggagtgtagaggcacaatcttggctcactgcaacctctgcttcccaggtttaagtgattctcatgcctcagcctgctgagtagctgggattacaggtgcatgtcaccacacccatctaatttttgtatttttagtagagatggggttttaccatgttggccaaccttgtctcgaactcctggcctcaggtgatctgcccaccttgacttcccaaagtgctgggatggattacgggtgtaagccaccacatccagcctcaagcctgcatccttaatcgctacactgtctcactttgggctaattcctcctcaccctggtcaggcaacagataggatgtctcttgttggcaagatcatcaggaaaccagatcttagctgagaccttccagcctctctgctcctgaggccaatggagatgctgtttcttttaatttaatttaatttaatgtatttatttgagacagagtttcactcttgttgcccaggctgaagtgcaatggcatgattttagctcactgcagcttctgcctcctgggttcaagcaattatcctgcctcagcctcctaagtagctgggattacaggcacctgacaccacgcctggctaatttttttgtatttttagtagagacagggtttcaccatgttggccaggctggtcttgaactcccgacctcaggtgatctgcctggcttggcctcccaaagtgctgggattacaggtgtgagccaccatgcccggcccagagatgctgtttctgtttcacccccacagtattccaggcataaagtcaagcagctctcaatgatttcagggagaagaaaaatatccctttactcacacaaagcatttagtaggtttagcccctttactgaagaagattggggcatcacctctcacactgctggctccctggatctctgtatattttcctcttccatctttcttcctctcaatctactcacccttcctacccaggaagaggcacaaattcctcatcctcagcagagagatttggtggtcctcttttgggaattccccttacacctcaagtatgtcattacgatgaacattgtatttcccggcgggccattctaaccctgtgctgtgaccaaggagccagcttgctccctctgtccctcagccaccctcggcacggtatcgctgccccgcctgctggcttctttgctacaggatagcaatagcacttctcacatcacatgcagacacaacaataatcagaggaagagacatctgtctttttcttgttttttgctttttttttttttgagaaggaagaaatattttccgagaaatttctcagcacacacctctcagaggacattggctaatgctgtgtcacatgcctgtgcttaaaccagtcacctgcaaggggacaggaccgtgaggattggttcactcagactaaaacttgctctttgggcctagagataggctccacctcaaggaagctcagggccatgtgagggaggcaggtagattcctaaacacaattggaattccattaacaaggaggaaatgaatttggggtagacaatagcatctgccacattgactgcaaatgtgaatatgagttagcaggagaaaaggagggtgtacttctaggaaggtggaagggcattcagcgatagtcaaggaatgtgagaagtctctcgaacctggggtcaggggcaaaaggaagtgatgtgggatattaaagcaagagagccaggcgtggtggctcacacctgtaatcctagcagtttgggaggctgaggtgagaaatctcttgaggtcagaagtttgagaccaccttgggcaacatagcaagaccccatctctacaaataataattttaaaaaattagctggttgtcgtggtgtgtgcctgtagtcccagctactctggaggctgaggtgggaggatcgcttgagcccaggagttcaagaccagcctgggcaatgtagtgagacctcagctttacaaaaaaataaaaaaattagccagacatggtggtgcattgtggtaatcacaacactttgggaggctgaggtgggaggatcgcttaagtccaggagatcagtgttgcagtgggctgtgattgtgccactgcactctagcctgggtgacacagcaagatcctgtctcaaaaaaaaaaaaaaaaaaaaatagaagaggtagggtgaccaaacacgcaggatcttattgactttgctaaatgttttttgttacaggaaagagaaaaacactgaattggaataaagtgcagccattattcatttgctctcactttgagctttaacacatatatgtgttttttttgttgttttcctttgtgatctttgagatccccaactccataaacttcttcccttgtgttacgtgctctgacttcagcaccacatttcagtgttacgattctgttaaagaaaaaagaaattaaattccattaatttctttcataggacagaagttaatcgcatcccttatacccatgacatccagagacagaattaaagccatcaggaaccagccaaggaccatggaagagaaaaggaaccttaggtatggactaaaggcttttcttctttctcagatttcatgcgaacctcaatcctctacttttgccccatctcaaaaagataagaaataaataagcacaatagaagagacaaatattcctgacagaaaaatttcaaatgccctctgtaggtactcctttctccaggggctacagcttaattcctgctcctgggctggagtgtgggctctgcttggtgagctgctttccaaagagtagggcgtggaaggaagagaggggtgtaactttccagtggagagtctgcctaatactgccttggccaagactcaaggttaacatccccaaagataagtcatgtgatgggggaaacatgtctcctctgtgctactctctcctaaaacccacaaccccagtctaaacagcgaaaaacattaggcaaatcccaactgaaggatattctacaaaatactcaaccagtaccccttgaaactgtcaaagtcatcaaaaacaaggaaagtctgagaaactatcatggagtggaaagttctacagagacgtgacaggctgggtgtggtggctcacgcctgtaatcccagcattttgggaggccaaggtggtgggattagttgagctcaggagttcgagaccagcatgggcatcatagtgagactccatctttacaaaaaatgaaaattaaaaaagagagacatgacaagtaaatgcaatgtggtatcctggacgagatcctggaatagaaaatggacatcggtggaaaaactggtaaaatctgaatagtctggagtttaggtaatagtaacgtaccagtactggtatcttagttttgataaacctaccatggaaatgtaaaatattaacggggaaactagcgagtggtatatggaagttttctttactgtctttgcaagtttactgtaaatctcaaactatgataaataaaatctttacttaaaaaataaagatcagactagtgcagtggctcatgcctgtaatcccagcactttcggaggcttaggcgggcagatcatgaggtcaggagtttgagaccagcctggccaacatggtgaaaccttgtctctactaaaaatacaaaacttagccgggtgtggtggcatgcgcctgtaatcccagctactggggaggctgagacaggagaatcgcttgaacctggaaggcagaggtttcagtgagccaagatcacaccactgcactccagcctgggtgacagagcaagactctgtatcggaaaaaaaaataaactaaaataaaaaagaaaaaatacataaagaccttaggagttttataagctcaggaattcaaaacccgagggtaagggctgttttagccttcagagtttacattaattgttgcttaatctttttttttctttttttcaatttgatatagttggcagaaagtagtagagtggatgcaacaacaattactagtaagtgattcatggatgtaggattttctgaggtttcaaagacaaatttcaaatcctggcagggtggaatagatttgtcaacaagtaaattacaaatggcagaaagtaaatcaggccaagtcaaaatagagattgcaatgggaggaccagaaaggtctgccctccctgactttgctggggaaaaatggagagagggggcatttgagctgggccttgaaagacaattgaccatgacattgggatgggccttcgaggtggaccaaagaaagctaggaaagaaccagaacaaagcagatgtggtgagttcatggaagggtaaggagaccaactgtgactgtgtctttctgaaaacacttccattttgaactctgtatggctgcctctgtcactgaatatgggctccaaagaccttatagcaagatttcttaatatcagtacaagtaacatctgagggctggatctttctctgttgtgggggctgttttgttcattgtagggtgtgtagcagcatctctgatctctatgtacttgatgccaatatcaccccctctccactccttagtttcacaaccagaaaagtttccagacattgccaattgtgtgggggcaaaatccccctaggttgagaatgtgtattagtctgctctcactctgctaataaagacatacttgagactgggtgatttataaaggaaagaggtttaatggactcactgttccacacagcaggggaggcctcacaatcacgacagaggacgaaggaagagcaaaggcacatcttacgtggtggtaggcaagacggcatgtgcaggggaactgccctttataaaaccatcagatcggctgggtgtggtggctcatgcctgtaatcccagcactttgggaggccaaggcaggtggatcacctgaggtcaggagttcaagaccagcctggccaacatggtggaaaccccatctctactaaaaatacaaaacttagctgggcatggtgggcgcctgtaatcccagctactcgggaggctgaggcaggagaatcgcttgaacctgggaggcagaggctgcagtgagccgccatcaggccactgcactccagcctgggtgacagagtgagacgccatctcaaaaaaaaaaaaaaaagaaaaaggaagaaagaaatgaggtctcgttcagttgcccaggctggactgcaatggtgtgatcatagctcactgcagtctcaaacttttgggcccaagtaatccccccaccacagcctctggagtagctgggactatacaggcaggcactaccaacacacccagctattttttgttaatttttttcttaatagagacaaggtcccactattttgctcaggctggtcttgaactcctggcctcagtgatcctcttgcctcagcttccgaagtgttgggattacaggcatgagcccccctgtaactattttttgaatgaatgagttgcaacatttgtatctctcattttctcttgctgttccctacaggaaaatagttgacaaagaaaaaagcaaacagacccatcgtatccttcagctcaattgctgtattcagtgtctgaactccatttcccgggtaagtcagtaaaacaggcacagcaagagggtgaaaacagggagggaggagagtgaggatgaaaggggactcagggggaagatgaaccaaaaatcagagcaatttcattgcccagagccaacggttagtacaggtgtggaaaagcgaggtgggcatggggaagaactaagaggttgctgagttcattggccaacttggccattgtgagtggcaccttcaacagcaaacctgggaaggtcataatagctccaccttagagttgacataacatttgtaaacatgcctagcatggtgcctgcacttaacaatactccagacatggtggctgtttctgttattatggcacctgctcagtcgatatttgttgagtcaacagcaagccacacctgctttgaatcctgattccaggcttatcggagatccaagaacagcctgtcggaaattctgaattccatcagcctgtggcagaagacgctgaagatcattggaggcaagtttggaaccagcgtcctctcctatttcaactttctgagatggcttttgaagttcaacattttctcattcatcctgaacttcagcttcatcataatccctcagtttaccgtggccaaaaagaacaccctccagttcactgggctggagtttttcactggggtggtaagtcctccacttcccctaccccaagtgcaccaatcacctcggaaacccagggacgtgccttgccggtcacccactcacacctctcattttgcctgggggtcaactgatggggaaagtggatgtttgaaatgttttcctggctgagtgtggtgactcatgcctgtaatcccagcaagctgggaggccaaagcagtggagaccagcctgggcaacatggcaaaaccccgtctctacaaaaatgcaaaaattagcagggcatggtggcacacacctgtaattctggctactcaggaggctaaggtaagaggattgcttgagcccaggaggcagagattgcagtgaagcaagattcccccactgcactccagcctgggcaacagagcgaggccttgtctcaatcatcaatcaatcaatcaataaagtgttttcctgcaaagtaacatacacacatcgtagtagaatttctgtctccagaggcaaccatcttgaacagtttgtttttatccacacacttttttggcaaacatatggacacttctgtgcacgtacagaggcattcttttcttttcttacaaaagatgaattattcattgtatattatctacaacttgctttttttttacttagcaatatgtggtgggcattttcttgtgttggtgtttatagatctatgttttctttctttttaatttttatttctacaaaatacaatgttccttttgaaaaattcctactatagaagaaaactaagagaaagttcattttatatttttttctttgtccaactccccattttgagatatatctttgtagactgtttttttcttcctgtacaaacgttgatagatacatacttgataaaaaaaaaaccaaatagatgacaggcacatagattattatgcttttaaaaataaacagaggataggattgtactataagcccttctttctttcttttcttttcctttccttttgtctttctttctttctttctttctttctttctttctttctttctttctttctttcttttccttccttccttccttccttccttccttccttccttccttccttccttccttcctccctccctccctccctcccttcctggaccccaaaatgtctttcataacttgcttattcagactaggattcagtcaacaatcagattttacattctgtgtccgcccccgccttaaatctctattaatctaaaataatcagccgggtacggtggctcactcctgtaatcccagcactttgggaggccgaggcgggtggatcacttgaagtcagaagttggagaccagcctggccaacatggcaaaaccccatctctacttaaaatacaaaaattagccggatgtggtggcagaagcctgtaatccccactactaggcaagctgaggcagggagaattgcttgaacccgggaggttgcagtgagctgagatcttgccattgcactccagcctgagtgacagagcgagactccatctcaaaaaaataaataaataaataaataatctccccagcccagccccttttttcttgacattggcttattgcagaaattgggcctactgctatgtagattccaacatcctaccttctggaattgtctgatgatttcctagtggtttctagaatttgtttctctggcttcttatttcctgtgcactgaaatgtaggcctataggcttgattcgtttcctattaagcatgtttagccataatactggtgacagaggcacataatactggtgaaacgagaggcctggctgtcgtgttcttgctgatgtttcacttgatcactgggccaggtggtaacagctcaatgtctccattgtaaagttacactggatttcttttcaagtctgagagcccagtgacacaatgtccaaattctcagtgcccctttcctggaaaacaaaatgtctaaactgactggcccaggcttcttgtattcaggagaggtcaactctcatgaccataatcgtttaccttttttttcaggagatccacctgacctatggtttattgtacctttcagggttattttagggacacagtgatgtactatggcttttacaccaattccaccatccagcacgggaacagcggggcatcctacaacatgcagctggcctacatcttcacaatcggagcatgcttgaccacctgcttcttcagtttgctgttcaggtatggaagcatctacatttcctgattctgagggtcatgttagatttcagcaaaaatccaagaaattcaaaaattacccaggtaacagtttctctgcagtcctctcctctcctctcctctcttttcttttctttcttagatagagtctcgctctgtcacccatgctggagtacagtggcgcaatctgggctcactgcaacctccacctcccaggttcaagtgattctccttcctcagcctcccgagtagctaggattacaggcacctgccaccacgccccgctaatgtttgtatttttaatagagatggggtttgaccatgttggccaggctggtctcaaactcctgacctcaggtggtccacccgcctcggcctcccatagtcctgggattacaggcgtgagccaccgtgcccagcctgcagttttgactttccattgctgtccaattattccttgtcctgcaatataaaaataggagtttggacagaggaagagaggtttttctgtgcttttaaagaaattggtcagcctgataataagggtgcagttaccccagcaatgatatgaagggaagaacatgatagataactatcagagaggaggtacaaatggaaaatacacatatgaaaggctgggcacggtgctcatgcctgtaatcttagcactctgggagtctgatgcaggctgatcacttgagtccaggagttcgagactggactgggcaacataccaaaaccccatctctactaaaaatacaaaaaattagcctggcttggtggcgcacgcctgtgttcccagctattcgggaggctgaggtgggagaatcacctgagcccattaggtcgaggctgcagtgagctgagatcagtctactacactccagcctgagcaactggagatcctgtttcaaaaaaaaaagagagagaaagaaagaaaagcaacatgcaatctctgtattagtttgctagggctgcctagcaaagtacagcagaccattggtttaaacaacagaaatttattttctcatggttctggaggcctgaagtccaagatcaaggtgtcagcaggcttggtttcctctgaggcctctctccttggcttgtagacggccactgtctcctgcctgtgtcttcacatggttatccctctgtgtcttaatctcccttttttataaagatgccatttgtactgaattgggacacaatttaatgaccccattttaaaaaaatgtaattaccactttaattaattaattaatttattttgagatggagtctcactctgttgcccaggctggagtgcagtggtgtgatctcagctcactgcaacctctgtcccccaggttcaagggattctcctgcctcagcctccctagtagctgggactataggtatgtgccaccacgtccgactaatttttgtaattttattagaaacggggtttcaccatgttggccagactggtctcaaactcctgaccttaagtgatccacccgcctcagcctcccaaagtgctgggattacaggcgtgagccactgcgcccggcctgtaattaccactttaaagaccctacctccaaatacagtcacattctaaggtactagggggttaggacttcaacatacgaattttgggaagtacacagtccaacccatagcaacctgactgccagcatactaattcaaactaaagtgagattttgttttgttctgtcaaagtaggaaatgattttattattattattattattaatattttgagacagagtcttgctctgtcacccaggctggagtgcagtggtgtgatcttggctcactgcaacctccgcttctcgggttcaagtgattctcctgtctcagcctcctgagtagctgggattacaggctcatgccaacacacccagctaatttttctatttttagtagagacagggtttcaccatgttggccaggctggtcttgaactcctgacctcaggtaatcccccctgctgggcctcccaaagttctgggattataggtgttagccatcatgcccggccagaaatgattctaaagttgctgttactgagtggtggcaaatttcagaacagcagcatccgtccatcttgtgcagcatttttgtgtgtgtgctcagggcttcctgggcctgagacagcccatgaccataacagtgccttcatcaagtgcttgctgctgtaagcactgcatagactctttggaaggctgaataatctcccccgaccccccccagagaagtctacatcctaatccccagaactggtgaatatgtaacttcgcataacaaaagggactttgcagatgtgactgaggatttttaaatggggagattatcctggattatcccagtgggcccaatggaatcacaagggtctttataagaggcaggcaggaggtcagagagtagcagggagatgggaagatgctaccctgctggctttgaagttggaggaggtggccacaagccaaggaaagaggacaccctctagaagctggaaaagacaaggaaatggattcttccctagagcttccagaaggaacatagccctgccaacaccttcattttagctctgtggactcattttctgattagctgggtgtggtggcatgtgcctgtagttccagctactttggaggctgtggcgtgaggatggcttgagcccaggaggtggaggctgcagtgagctatgactacaccactgcactctagcctgggccacacagcaagacctcatccctaaacaaacagaaaacacaaaaacaagaaaagacattttctgacttctgatctctagaagggtaaaagaacaaatttgtgttgtttttagccgctaagttggtggtcatttgctatagcagcaacagggaactgggtggattacttgaggtcaggagttcaagaccagcctagccaacatggtgaaaccctgcctctactaaaaatacaaaaattggccgggcgtggtgatgggcacctgtaatccctgttacttgggagactgaggcaggagaatcgcttgaaccttggaggtggaggttgcagtgagcagagatcacaccactgcactccagcctgggagacaagagtgaaactctgtctaaaaaaaaaaaaaaaaattctgtgaggtgagttttattgttattccctctctacagatatggaaactgaggctgagaatcagaaccattcacaagacaaaaatcccccagttggcagatccagggttgcaagccaggcctgtgcagccccaaaaccagtgcttgtttaaccactgtgtggtgaccacaccgctccaggccaacagcttggggctaagtcttcacgttgcctttcaccattaataatagggctgccctttgttgaagccctgcactcccagtgacggccataataaccttcaggtgttctgctttctgccttctctagcatggccaagtatttccggaacaacttcattaatccccacatttactccggagggatcaccaagctgatcttttgctgggacttcactgtcactcatgaaaaagctgtgaagctaaaacagaagaatcttagcactgagataagggtaaggcgagctcactttactcatttgccatcggctggtctccttcccttctccagtatacctgtaacttttcttttttttttttttgaattggagtctcactctgtcgcccaggctggagtgcagtggcgcaatcccggctcactgcaggctccgcctcccgggttcacgccattctcctgcctcagcctcccgagtagctgggactacaggcgcctgccaccatgcccggctaattttttgtatttttagtagagacggggtttcactgtgttagccaggatggtctcaatctcctgacctcgtgatccacccacctcagcctcccaaagtgctgggattacaggcgtaagccaccgcgcccagctgttttttttttttttaacggaatctcactccgccgcccaggctggagtgcagtggcatgatcttggctcactgcaacctctgcctcccgggttcaggcgattctgctacatcagcctcccaagtagctgggattacaggcacctgccacctcacttggctaatttttgaattttttagagatgaggtttcactatattggccaggctggtctcaaactcctagcctcaagtgatccacccgccttggcctcccaaagtactgggattacaggcgtgagccagccaaggcaatgattttcaacccagagaaatctggcccctcagggggacatttgacaacctctagagacttttttgattgttacaattgggaagaggggtgctcttggtatctagtgggtaagaggccagtgatgctgctaaaaatcctacaatgcgtagaacagcacctgcagcagagaattatgcagcccaccatgtcaatagtgcagaggttgagaaaccctggtctatagacacaaacttattaaaaaaaaaaaaaaaaaaaaaaaaaaaagcagctgggcatggtggctcatgcctctaatcccagcaatttgggaggacgaggcaggcatatcatgaggtcaggagttcacgaccagcttggccaacatgatgaaaccccatctctactaaaaaaaggacaaaaaagtagccgggcgtggtggcgggcacctgtaatcccagctactcaggaggctgaggctggagaatcgcttgaacccaggaggcagaggttgcagtgagccaagatcgcgccactgcactccagcctgggcaacaagagtgaaactccatctccagaaaaaaacaaagagcaagctgattttataaataaaggggctttaaattttttttttttatgattttcgagacaaggtcttgctctgtcacccaagctggagtgcagtggtgcaatcataattcactgcagtgtcgacctcctgggatccagttagcctctcccacctcagcctgctgagtagtggggactatgggtgcacaccaccatgcccaactaatttttaaattttttgtagagagagaatctcactatgttgcccaggctggtcttgaactcctgggctcaagtgatcctcccacctcggcctcccaacatgctggaaattcaggtgtgagccaccaaacccagccaaataaaggggcttcaacaagagggttgcagatgtgagcttctttctcagtgtagatacccaaccttattcttcaagaaagaattttgtgacctcagtgtgcttttcttaagaacatggtcccgatctattaattccaactgtttctgaaagatggaagcagtgtttggagattcttggcccatttcagagtcctctatgggtctcccataatccatgttcatcatgaatgttccccctctctctcacctgtggatttgggctggattcatgtctctggatgtggcaagcattccctggggatctttgctagcagtggagagggatctctggataaacttgactttcatttatttttatttatttgtttatttatttatttgttgtttgagacagagtctcactctgtcgcccaggctggagtgcagtggtgccatctctcctcactacaacctccacctcctgggttcaagtgattctcctgcctcagcctcccgagtagctgggattacaggcatgcaccaccacgcccggctaatttttgtatttttggtagaggcggggtttcaccatgttgtccaggctggtctcaaactcctgacctcaagtgatccacccgccttggcctcccaaagtgctgggattacaggcgtgagccaccatgcccagccataaacttgactttcttatgtttctaggagaacctgtcagagctccgtcaggagaattccaagttgacgttcaatcagctgctgacccgcttctctgcctacatggtagcctgggttgtctctacaggagtggccatagcctgctgtgcagccgtttattacctggctgagtacaacttagaggtaaccaacaccagggtccagggcagagagaaccaggtgaagggatgagatgctggaggggaagggtggtgtgcagcctacggttcaacccaggatctatggccagcagcatcagcactagcagagaacttgttaaaaatgcaggggtgaggcacagtggcttacacctgtaatcccaacactctgggaggccgaggcaggaggatcacctgaaacccaggagttcgagaccagcctgggcaacatggagacttcatcgctaaaaaaattttaaaaattagcctgtcacggtggtgtgcacctgtagttctggctacagtggtggtcattcattggtgactacagtttcacatgaatggagctcagctgtgtcgtttcacagccctggggccaggccttgccttgtttgatctcagttaattcttgcaacatctctatgagtcatgtgatcatctctccattgtacagatggagaaaaggggctcagagaagctaaggatctggccccaggccttgcagcttacgtgtggggagggagccgcattggaacccaggttaccctggctccaaaactaccaccaaaaatgcaagtggtgcttttgaaccatccagaggtagacggaggtagggtgaggccatgcagggaggatatgggaatgtgagatatcagataaattcattggaatccctgactccaaggcccatggaaggatgcctagcagaagtgcagtcccggctccactcccagccaaatgccagagtgctgcctcctcctggaggcccagtgcctctcccagcctcacacaaaagtgcagcacagggccaggcacagtggctcacgcctgtaatcccagcactttgggaggccgaggcaggcagatcacttgagatcaggagtttgagactagcctggccaacatggtgaaaccccgtctctactaaaaatacaaaaattagctgggtatgatggtgcacccctgtaatcccagctactcgggaggctaaggcaggagaatcacttgaacctcggaggcagaggttgcagtgagccgagatcgtgccactgcactccagcctgggcaacagagcgagactccggctcaaaaaaaaaaaaaaaaaaaaaaaaaaaaaaaaaaaaccagcagcacgggctagcagagacacgccaaccccctaattcagaactcagagagaggtgaagcctggtgaaaatgaacaaggccacttatgctaaacaggagggagcacatcctcattgccctgggcatcttggtaaaaaagggaaagccacagaatgattgttcgagctcaggctcctgagtcagacacacctaggctccaatctgccacttccttgctgggtgaccctgggcaagtgtcttcccctccctgagcctcagtttgcttggcacggggtaaggaaattaatggtagcttaacaaaatagttaacctagccgggcgcgatggctcatgcctgtaatcccaacaccttgggaggccgaggtggatggatcacctgaggtcgggagttagagaccagcctggccaacatggggaaaccccatctctactaaaaatacaaaaattagctgggtatgttggtgcgtgcctgtaatcccagctactctggaggctgaggcaggagaaccacttgaaccgaggaagtggaagtttcagtgagctgagatcgcgccactgcagtccagcctgggcaacacggtgagactccatctcaaaaaaattaaaataaataaatagataaatagttaaccgcagaggagctacttctcgggttttctatcatgggagacttttgagtgaagcagaaaggggtacagtgtacaagtcagccctccgttctctcccccatcccctgcagttcctgaagacacacagtaaccctggggcggtgctgttactgcctttcgttgtgtcctgcattaatctggccgtgccatgcatctactccatgttcaggcttgtggagaggtacgagatgccacggcacgaagtctacgttctcctgatccggtaggtgatgtgtcgcgcccaacaccagcctctatttccacagagagaagtgggatggcagctagaaaggattatgctttagtatcaaagttttttctccagagaggaagaatttcaaaagtaaggtgtggctgggcgtggtggctcatgtcagtaatcccagcactttgggaggttgagtggggaggatcacttgagaccaggagttcgagaacagcctgggcaacatagccggatgctggctctacaaaaagctggatgcagtggcatgcacctgttagtgccagctactcaggaggctgaggtgagaggatcacttgatcccaggagtttgagcttacctatgattgcaccactgcactccagcctgcgtgacagagcaagaccctgtcttaaacaacaacaaaagagtgaagtgtgtttgtgtggtgtgggcttttgctcaaagtcatggcttgattgctttcctaattgctaccagcaggggattgatgtagttctcaagtatgggatgtacagatgggcaggcagtgcacgcacaaaggctcctgggctgaggacgggactgaaatcatccagcgttccccttagtcaagctgtgagtcctggtacccactgcctcaggcgggaggaagggcccatttttgtaattccaccacccaaacaaaggtgggaggagtgctttgggcaactcactggcacccatggggtgcctttttgtgattcccacaaaggcatcatacgtgctagaagtgatcccagagttttgatacacaaagcctggaactgcccaaattttgtccctctagtttcttcccttactcgttcctggttatggtggggtttataagtacaggtctgtaggccgggcatggtggctcatgcctgtaatcccagcactttgggaggccaaggcaggtggatcacctgaggtcaggagtttgaaaccagcctggccaacatggtgaaaccccgtctttactaaaaatacaaaaattagctgggcttggtgacgcatgtctgtaatcccagctacttgagaggctgaggcgggagaatttcttgaacctgggaggcggaggttgcagcgaaccgagatcctgccactgcactccagcctgggtgacagagagagactccatctcagaaaaaaaaaaaaagtgtaggtctgtacaatgcagactgagtttctttgctgatcagttccagagcccttgccttaccacggtctgtgagatccggctcccggccagcgctccagcctcattttctccccatccttcctgctcactgcctgtccccgtcacagacctcctaagcgttcacaaatatgccaaaccatattcccacctctggacctttgcatgggcctggaatgttcttcccacacatgaccacatggcttgcttcttgactgcattttgcgttcttcaaacatcaccctcgtgttgcactcttccttgcacaccccattaaaaataacagctccctaccaccttttctcctctgcagtataattttctttcttttttttttttttttttttgagatggagtctcattctgtcgcccaggctggagtgcggtggcatgatctctgcagtataattttcttaccacttcctgacatatttgtatttatttattatcttcctctcccacagtttatggggaaatctttgccttgttcacagtgtctgggatatcataggtgtccaagaatgattggtgaatgaataagcaaattggtcagtcagttgattatatccaattcatattatgaaaattccagccaggtgcagtggctcgtgcctgtaatcctagcactttgggtggccaaggtgggaggattgcttgagcccaggagttcaagaccagccttggcaacatggtgagactccatttctataaatatttaaaaattagtcaggcatggtggattgcacctgtagtcccagctactcaggtggctgaggtgggagaagtgcttgagcccgggaggtcaaggctgcagtgagccatgaccacaccactgcactccagtttgggtaacagagtgagaccctgtcggaagaaagaaagagagaaagagagagagagaaagaaagaaagaaaactctgactatattcctatgccctcattattccccacatcccagccaccgatccatggtgccacttttaaaagtttgtatagaaggggaaatgttaggtctcactgcaccccataaccttgcatattgagtatgatgggcataaaataccatctactagatgatggaattgtaaagactgagggggatgattcaataaagaggttggcagtgtacgctgggtcagcacccaataaacattatgtacatttactatcattataatgggaagtgaaatcagatcatttggagatgcaacaaaagagaatgtatcagtcagaataagttaggttatactgcagtaacaaccccccagatctcagtggcttcgaacacaaaggtttatttcttgctcgtgttatatacacagtgtggattagcaggagggaccttcttatgttagttactgagggatccaggctcagagagaagcagccatcttgaatatcgttgatcgccattccaaagggaagatgaggagttctggagagtctcacaggggcattaagtgctccagcttagaagtgacacacattagctgggtgtggtggctcacgcctgtaatcccagcactttgggaggccgaggcgggtggatcacgaggtcaggagatcgagaccatcctggctaacatggtgaaatcccgtctctactaaaaatacaaaaaaaattagccaggtgtggtggcgggcgcctgtagtcccagctactcgggaagctgaggcaggagaatggcgtgaacctgggaggcggatcttgcagtgagctgagatcgcgccactgcactccagcctgggtgactgagcaagactccgtctcaaaaaataaaaaaaaaagaagtgacacacattgcttctgttcacaattcattcactggaactagccatgtgcccccctccaaccacaggggccaggaatttctatcttaccatgtgccccaaaggagctatttgcagacagaatgaaagactgccattgaaggtaatcataaatgttgtctcttctgtttagaaacatctttttgaaaatatcaatcattggcattctttgttactattggctcaacaccgtggccctgtctggtgaagaggtgagattctatgcttctctgccttaagtttggtttcttagcatttgaccaacagggaggacaggggtttctcaagagccatcacactccgtatttggtattaatcccttgtgggaagagaatgaaaactaatctggaaagcaacataaggcaaaatgggtctcaacaaaaaagctcaggttctagagtcaggaggacctgatttgaaggccagctgtgctgtgtcatcttccgagtcacttaatctctttgagcctcagttttctcatctgtaaaattgggattaaatgatatcatgtgtagtataagttcagtgcccagcatatgcaatagacactagtaattttagtgctagtctgtcctaacagctttggggttggacaaaattctttttgatccttgatgttctatttttcctgtaacctagataccctgggctttaccaatatgtaaactcataaatgctggcagtaacaattatgtcctaatgctgactgtttctggccgtccttcacttaactacagtttctagtcttcactgacctcagagaatgggtgcctgagggtggtgtcccatgtggatttaggaacaagccagcctccctggccttctcattgggatgcctctgcccctgctactgcatcccccatgagaatgtgccttcacatcacacagcaatccttagctgatggtcattgtgagctctcagatacccaggatgccctggggttggaagtagagtcaggaatcaggagtctctctctatttctctgtcacccattattcctgggccctaaaatagctctgttgtgtctatactcaaaccatcttacatgaacatggcaccctcaacttctctccctaattgtcgaagagattcaaaatcagccctccaagttagtatggttagagcagataccatattcttcttccatgcattcatccattcatgcatccatccatccattcccccatcattcatttatccatccatgcatctattcatctgtccatccatgtatccatctatccattcattcatacatccatccacttatccatttatccatccatgtatggatccatccatccatccatatatttatctattcattcatgtattcatccatccatttatctaaccatccatccatttattcatccacgtattcattcatgcatgcatccatctatctgtcaattcatgtattcatccagccatctattcatccatccattcatccatccatctatatacccatctatccactcatccatcatccatccatttacccatccatcatccatccatccttgggctgtgcacccaaaagtttcctctcctccttcagccaaatctaaaagctcccagtctatcagctgatagcactgacttcctgcagaagttcctagccactagtttcataaactgactaatttgagcttccagtttacactagcctactaaacctctaggccactttcttaatcaagcagacattaattgattttttgtaaggtaaataagcaaaaagagtgaaggcattcttagccattggcacttctggctctgttgaagaaaccgattacccttggctgagaaatgggatccagaggggatagggcagggaagaaaagttttacggggagagatcatgaacagggaaagtttgggtatgtgtggaaggcaagctttaatgggggaaagaaggaaacccaaaagagaacaacatccctgggaacaaactcagctgcattttttcagagtgggtctacttttttgagtacacaaggacttggtcaaacccaaccattagctatgtcctgatgggtacatagagccaggaacagaggagaattgagctgaggccacagccccttcccacatcctgactcttgtttgccttccagtgttgggaaaccctcattggccaggacatctaccggctccttctgatggattttgtgttctctttagtcaattccttcctgggggagtttctgaggaggtaaatatttgccattcttaagtaattagggcctgatgctgtaaacagaacctgattcctggctgagtgggacatacaggtgcctgacatactcaaagcgtgcgttgttccaagtctgcctgttgtccttggggatactgttcacttctaaattagctaaaatttcaccttaacctgacagttctgttgtcatagttcactcggttcagttgaccttttacaaccttttgaaaacaaattctaaaaataaaagacagaaactgagccatttgaaatcttatccagccgagggcagtggctcacgcctgtaatcccaacactttgggagaccgaggcaggaggatcacttgaggccaggagtttgagactagcctgggcaaaataggaagactctgtctctatccaaaaaaaaaaaaaaagaagaagaagaagaaaaaggcaaagaaagaaaagaagaaaaaaagaaatcttatccactgtagataatttcaatattctagtatatattcctccagatttttctatgcacacattgctctgtgtgtgtctttactatataatgctatataattttcaaaagcaaaaatggagtcacactgcaacatattgtagaatttgcttttactaatctgtcactatgccttgacatctttccatgtcagtacatgtagatttatctcattgttttaattgaattaatgtattaattttatattagatatctatctatctatctatacagaattgaggcactgtcactgtcccatgtctggttttttaaatttagtaattcatttttttaataatatgatgagcctctcattccttatagacatttatgtatttccgcaagctgctctagtaataagatggtctgatgttgattattttctcagtggatagattcaatgccaaatttcctcattcatttttgccaaaatgtgcttttattctagcctctgtcgagggcctggacataaaggtgaaaaggtttggccgggcacagtgactcatacctgtaatcccaacactttgggaggccaaggcgggtgaatcacctgaggtcaggagttcaagagcagcctggccaacgtggtgaaaccctgtctctactaaaaatacaaaaattagccgagcatggtggtgtgtgcctataatcccaactacttgggaggctgaggcaggagaatcgcttgaacccgggagatggaggttgcagtgagccgagagggcgacattgccctccaccctgggtgacacagcgagactccatctcaaaaaaaaaaaaaaaaaaaaagtgaaaagatttttttttgacagatctttttttttaaattggcaactcatctttatgaataaattaatatgaaatcaagtttccccagagtaaatggaaacttggtttccttcttgtggatttagaacacagggaaacataatttgatagcagcaaccaaaaatttaaaaatgtttatttgagttgagaggtgctgagttcatctggttcatgaaaaaataaggtttaattagcaaagaggggtataagataatagtgggataatttaaatgttcagggtaacaaatattctctagaattttttaaatcactttagcagtacccccactagactgcattgtgttaaattagttttccctcaatcccttcaattacttcttcaaaaacatgcttatagatttagaacttttgaaaaattttcaagggaacttacgactttatttcaagctggggagggtctcttttgttgattgtcctagtctgtgggggatcttctgaaagtgggagttatggtttgggtactaaactcagtatgttttcacagaatcattgggatgcaactgatcacaagtcttggccttcaggagtttgacattgccaggaacgttctagaactgatctatgcacaaactctggtgtggtaagttttgtgactcagcaaaatgcccagtggttcccacatgactgtggagctggtgttttggtggcaaagtcccagaatctgttgtttttaaagctgcaggggtgataacccatccagccagtctgagaaccatgaatttagcatttagactatcattttcctttatgagagcttaaggacttcagacaagaatcagcatagagcagggatcgcaacctggaagcccacaggtcgtgtccagctttgcaggtgtgtttcttttgtccctaaaaatatgaattaaccactgctatggtctcaatgtttgggtctcccctcaaattcatatgttgaaaccttacttccaatgtgatggaggtggggtctttgggaggtgatttgatctttgacatggcccttaggaataggattagtgcccttataaacaaggcctgagagaccccttgccccttctaccacgtggggacatggagagaaggcaacatctgggaatcactaagcagggcctcaccagacactgaatctaccagcaccttgatcttggacttcccaacctccagaaccataagaaataaatttctgctgttttatttatttatttttattttttagacggagtctccctctgtcgcccaggctggagtgcagtggtgtgatttcggctcactgcaacctccgcctcctaggttcaagtgattctcctgcctgtctcccaagtagctgggactataggcatgtgccaccatgcccagccaatttttgtatttttagtagagatggggtttcatcatgttggccaggctggtcttgaactcctgacctcaggtgatccgcccaccttggtggatcccaaagtgttgggattacaagcatgagccaccacacccagcctctgctatttataagccacccagtttatggagttatagttatagcagcctgatggactaacacaccacctatatttaaacttcaggagatttcacataacacctaaatttctggcttctctccagaaacatctggcttctctccacaaagatctgtggcaaactgagcatctccagtttgtcacaatctccacctttaactgttgtctgttagcattgatttgccattttgctttgtccttaggttgtttcaatgcaaactttactttgcatccatgtctccacagcaatgggagaataaagaaacacacagagagggctgtgtgtttcttatatttgatacaccatttggtgggttctctatagttttttggatttgtgacgtctgttttagaaactctgcgtgcattgagaatagccaactggttgcagcaaatatttttacaaactcacctagacactgcaaacaattagccagtggctgtgtttccttatttatttatttatttatttatttttaattttcttattatttttttgagacagagtcttgctctgttgctgaggctgaagtgcagtggtgcaacctccacctcccgggttcaagcaattctcatgcctcagcctcccaagtagctgggactacaggcatgtgccaccacacctggctaatttttgtattagtagagacagggtttcactatgttggccagactggttttgagctcctggcttcaagtgacccacctgcctcagcctcccaaagtgctgggattataggtgtgagtcaccatgctcagcctatttatttatttttgagacagggtctcactctgttgctcaggctggagtgcagtggcatgatcatggctcactgcagcctcaacctcctgagctcaggcaatcttcctgccttacttttccttacttattttaacatgatgcagttaatgccggaactctgtgtggtgaatcacattcccaggttccatctgatggggtgttgctaatttgaaagtattggatttggaactggataaactgaattctgaggctggctctgccactcatggagatcactgtgcttgtctgaacctcagattcatctgtaaatgcacataagaatagctacctttaaggccaggtgcggtggctcatgcctataatcccagcactttgggaggctgaggtgggtggatcacctaaggtcaggagttggagaccagcctgacaaacatggtgaaaccccatctctactaaaaatacaaaattagccaggcgtggtggtgcatgcctgtaatcccagctactcaggaggctgacacacaagaattgcttgaacctgggaggcagaggttgcagtgagccaagatcatgccatggtactccagcctgggcagcgagagtgaaactctgtctcaaaaagaaaagaaaagaaaagaaaaggccaggcacggtggctcacgcctgtaatcccagcactttaggaggccggatcacctgaggccaggagttcgaggccaacctggccaacatggcaaaaacccatctctactaaaaatacacacaaaaaattagctgggcgtggttggaagtgcctgtaatcccagctacttgggaggctgaggcaggagaatcacttgaacccgggaggtggaggctgcagtgaacagagatcacgccattgcactccagcctgggcgacaagagtgaaactctgtctcaaaaaaaaaaaaaaaaagaatagctgcctttgaatcatgttgaggattaaatgccatggtaaatgaaaacgctttgcaaacaccaatatgtcatacaacgggaaagttttattttctgactctttaaagttgccctgggtgatttggctgtctgcaaataactcaaagttaatgagtttattttttagagacagtgaggacctttcttttgtagtttaggtgatgtgtttgcatgctgctagatcacccactggcaatttggcagtttacaaagtcctttcttccacattatttcaactaggatgccattgggcaagttacttaaactctctccaaaccttagttttctaatctttaaatggtacagatacctactcacagggttttcgaggggattaaataggcatggtggctcacgcctgtaaccccaggactttgggaggctgaggcaggcagatcacttgaggtcaggagttcaagaccagcctggccaacatggtgaaaccctgactctactaaaaaatacaaattagccggctgtggtagcagatgcctgtaatctcagctacttgggaagctgaggcaggagaatcacttgaaccagggaggcggaggttgtagtgagccgagatcatgccactggctgcactccagcctggagatagaacgacactccgtctcaaaaaggaaaaaaaaaaaaaaaagaaattaccattatgacttctgggcctttgagatttttgttgataaatcatgaataagcaccatcaaaaacacatcttttttttttttctccatggttatttcagttctaacctttgcgggttttaggagaatattgcctttgatgatgagttttacaagaagataatataatgacagaaaaggatatatgttagggacagtagtagagatgaagtgaggaacatgtttcccaagttttagtctattgtacactagcctgcctattttttggtatagtgacgtttcacctgtaccattatctacttaattttttttattatttgcctttttttttttttttttactcaaataagtttttttttaatgccatggtagatgataactgcttttcatcagcctcccaaagtgctgggataacaggagtgagccaccatgtccatttattcttctcaaaaaaccctgtgagtaggtactagtacgtccaccatttaaagattagaaaactaaggtttagagagagtttaagtaacttgcccaacggcatcctagttgaaataatgcagaagaaaggcctttgtaaatggccagactgcttttcccaacatcggcaatcttcctggggtcagtaagaccctagatgtcaaaacgtcaggtgcctgccaccacgcccagctaatttttgtatttttagtagagatgggggttttgccatgttggccaggctggtttcgaactcctaacctcaggtgatctgcccgcttcggcctccaaaagtgatgagattacaggcatgagccaccacgcctggcctctcacatatatttttaagggagtctttatttacaatcataaatggaaaaccagtgccatttgaaagaaatcacaaataactggaaaaataaaagcaatcccattccaaaaagtcattaaattctagcgagatgttacagtttgctaaggctctcagcccgaagcctactcctttcttgttaaaaaatgggagaatggcattctagaaccacactgagattttctccttttgttgctcacgagcaccgcgggagagttgtaaagggaatgcctttctcatttggaactcagtgctattcagtgccttgtccctacaggacctcagaccttgaataccatgggggaggaagaaggagaggggcaaggcatgtgggacatgctagcttagggcatgctgaataccatctgttggtttaataggtgggtgggagatttctctataaaatctcttttccagagctgggaagaaggcagctgaggatactgggtatggtgggaatctgcctaatttgctgggatggaagcaggccccctctgtgttcgtttgctggggctgccataacaaagtctcacacactgagtgccttaaacaacatcaatttcatatcttacagttctggaggccagaaggccaagatcaaggtgcgggtggggttggtttcttctgagggtcataagggagggatctgtctcaagcctctctccctggtttatagacggccatcttctccccatgtctttacatggtcttcatttctgtgtgtgtctatgtcctaatctcttctttttttgttgttgagatggagtcttgctctgtcacccaggctggagtgcaatggcacaatctcggctcactgcaacctccgcctcccaggttcaagcgattctcctgcctcagcctctcaagtagctaagattacaagcatacgccatcatgcctggctaatttttgtattttttgtagagatggggtttcaccatgttgcccaggctggtcttgaactcctgacctcaggtgattcaccccctcttggcctcccaaagttctgggattacaggcataagccaccgttcctggcctcctaatctcttcttttagggacaccggttgtactggattagggcctcctacagtgatctcattctaccttaatcacctctcaaaggccctgtctccaaatacagtcacattctgagatattcggggttaaggcctcaatatatggattttggggacacacaatccaggccacaatatcttctttctcttccccccaaccatcccagattcaccccgactccttgtgtctccgccagcctctgacactcaccctctctccctcacaggattggcatcttcttctgccccctgctgccctttatccaaatgattatgcttttcatcatgttctactccaaaaatgtgagtcagtccgacattgccatcaatcagctttgttcagtcacctgtgacctggtggcgcttaaagctggggaagggggctctgcaaaggtgtcaggaagccaggcctggctggggtccctctgccgctgctccggctgcagatgggaggtggctgcctctctctcttcagatcagcctgatgatgaatttccagcctccgagcaaagcctggcgggcctcacagatgatgactttcttcatcttcttgctctttttcccatccttcaccggggtcttgtgcaccctggccatcaccatctggaggtaggagaaggtggccttgggggaggttttagagactgggtggatgggtgtgtgttttaaaacgtaggttttattataattcaggtgtggtgaggccgggtgcagtggctcacgcctgtgatcccggcactatgggaggccaaggcgggtggatcacttgaggccaggagttcaggaccagcctggccaacatggtgaaaccctgtctctactaaaaatacaaaaattagccaagtgtggtggtgcatgcctgtaatcccagctgctcttgaggctgaggcaggagaatcacttgaacccgggaggtggaggttgcagtgagccaagattgcaccattgcgctccagcctgggtgacagagtgagactctgtctcaataaataaataaataaataaataaataaataaataaataaataaataaataaataatgtaggtatggtgaagcccaacaggtcaggaatgaccatcactaaaaagatagtttattactcacagttcctgagaagagggggcactctatgccacaagggaccacacagggaagcatcagggttgttcaggaggcagagggagtgaggggaaacgggctagaggctttattgtggttttctatggtaaggaatgggcaaggcaggggaagcaggtttagggttggctggtttgtcagtaggctgtgggatatggatccgccctgagttgtctggcacctggccctggggtgattagggcaggggagtggtggcccagagtgtgagagcctgataaagggggcggttgcgggtgtgggatctggattggttggtttgcatttgaaaggtgtgctttgtaagctagcccagggaagggcagctagccctgggagctggagtcagtaagaccccagatgtcaaaacatcagaataaaaagacatgcttaatacagtgcctaactcaagttccctggctaaccaacagacactaaaagccagggagggaatgcatcctagtttgatcaccacccatccgatgcccacggtcaggagtagctttctcacttctgccaagaactgaagcttcccagaatggggaagatgcccccccaccccgttcctccacatccagaacagaacttcatctaaattaacagaaaggcaggactcatctggctcctcccacctctccaaccccacttccctttggctccactgttccccgcgccaccaccctcaccccattcctggaagccagcaagcccctcccaacaagggcagagtcctctgagtgaagtccttttcccactccctttgcttggctgcctcctctccaccctctgattctcagctccaaggccctctccaagatctgatcttcacagccctccttgtctgctctcagttccccactgcttctctctctcagacctgagtttctttccttcattctatcattcataatcaggaatgcctctgtgtgagtctttaattgttactcaacgattgtccgtttttcccaccagaatgtaatcccaatagggcaggaacttgcttaatatgaagtccccagagcctgactagaacagtgcttaacagaataagccatggttgaatgaacaattgaatgaattaatgaacaagggagatgatttttaggacacatgtgaaactggggctctcagttccttgctccacaacacccttgctcctcttggcatatccactctcttctctctcttccttgctccacaacgcccttgctcctcttggcatatccactctcttctctctcttcctcaccagttccttgttgccctatagtttctgctcattcctccatagctaacaggcttccctctttatgcttcttaattcaatttctttctttgagacagggccttgctctgccacccaggcaggaatgcaggggcgcaatcacagctcaaactcctgggctcacgtgattgtcccacctcagcctcccgagtagctgggactataggcacacatcaccatgcctggctaattatttttttattttttatttttttgagacagagtctcactctgtcatccaggctggagtgcagtggcgcaatctcggctcactgcaagctccgcctcccaggttcacgcccttctcctgcctcagcctcctgagtagctgggactacaggcgcccgccaccacgcccagctaattttttgtatttttagtagagacagggtttcaccgtgttagccaggatggtcttgatctcctgaccttgtgatccacccgcctcggcctcccaaagtgctgggattacaggcatgagccaccgcgcctggcatgcctggctaattttttttttttttttttttttagaaatgggtgtcttgctatgttgcctaggctggtctcgaactcttggcctcaagagatccttctgccttggcctctcaaagtgctggaattgcaggcgagccaccatacttgtctttaatttcatttctttttttttttcagacagggtcttgctctgttgcccaggctgaagtacagtggtgtgatcacagctcactatagcctcaacctcctgggctcaagtgatcctcccacctcagcctcctatgtagccaggaccacaggcatgtgctgccatgcccagctaattatttttttgtagagatggagtctcactatgttgcccaggctggtcttgaacttctgggctcaagcaatcctcccaccttgacctcccaaactgttgggattagaggcatgagccatagtgcctggccttaattcaacttcttaagaaaaaaagtctgactgcccccattcatatcattgagccaagttactgcagaagtcactgcttggcctttggattggctgctgttgggtcagctctgatctgagagcaggtccttagagtacaggtcaccccagcaaggctgagagcaagagggtttctttgggaagtgggtgtgattggatcaggcaagacttgatgttttcaggcccagagcccagaagggacaccctgattctagaataaccatccctgagtcttgtgctagagatgttcttccatctttgttttaccagattgaagccttcagctgactgtggcccttttcgaggtctgcctctcttcattcactccatctacagctggatcgacaccctaagtacacggcctggctacctgtgggttgtttggatctatcggaacctcattggaagtgtgcacttctttttcatcctcaccctcattgtgctgtgagtgtggtacccggggaatctagcagggaaagccaggagctctcgagggaaacagcagtagggatgtttggttggaaagcaaatggctatagcatagctcagtgttctgggtgactctacccttgcataggtagttttctttccttccttccttccttccttcctccttccttccttccttccttccttcccttcctttttttcttttctcttctcttcccttcccctccctccctctctttctccctttctcccttccctttcctttcagttccgttcctttcctcttcattttttcttccttccttccttccttctttctcccttcccctcccttcccttccccttctttctcccttcccctcccttcccttcctttccccttcccctcccttcccttcccttccccttctccttccttccttccttccttccttacttctctctttcttttttggttgagacagggtcatgatctctcactcaggctagactgtagcggcatggtcatggcttgctgcaacctcaacctttcaggctcaagccatcctcccacctcagcccccaagtagctgggcttgcaggtgtgcaccactacacttggctaatttttaaattttttggagaaatggggtctccctgtgttgcccaggctggtctcaaactcctggcctcaaattatcctcctgcctcagcttctcaaagtgttgggattacaggtgttagccaccttgcccaagcttgcattgatagtttttttgaagttacttagcctggtgcagtggcttgtgcctgtagtctgagcttcttgggaagctgagatgggaggattgcttgagcctaggagtttgaggctgcagtgttctctgatcgtgccactgcactccagcctgggcaacagagcaagaccccatcactgggggaaggggggaaaggttatatatactatcttcttgtcttagggattttttttttttttttttttgagacagagtctcgcactgtcacccaggctggagtgcactggcgcgatctcagcacactgcaagttccgcctcctgggttcatgccattctcctgcctcagcctcccgagtagttgggactacaggcacccaccaccacgcccagctaattttttgcatttttaatagagacagggtttcactgtgttagccaggatgatctcgatctcctgacctcaagtgatccgcccgccttggcctcccaaagtgctgggattccaggcatgagccaccgtgctgggtcatcttagggactttttttttaacttattctattaagaaagcaatacctgcttttctcctcttaaggagatgacatgcccagagatgctcaattaattggtctgaagaggagctgtggcatgggcttatttcccccttcaggaaccattgttccaatgtatttaacctataactctccctgacatgacttttcagaaacatgtttgggccaaatccatctgcaagcacagattccagttcctttgcatccagtggaaattcagagcctgcaaaacatttgcaagagtgtcattctttcttttctcctcttccagaatcatcacctatctttactggcagatcacagagggaaggaagattatgataaggctgctccatgagcagatcattaatgtaagtccccttggatccctctgatgtccgccctcaccctttttaaacgctgtataaacatcctccaaaataaagagaatactacaatgaactctcatatccctgctctcagccctaacaaccatcaatgtttttatattcttatttcatctacactttctcttcccagcaaatcccttatttttattcttagtatttatttattttaattatgatgattattattattattttgagatagagttttgctcttgttgcccaggctggagtgcagtggtgcaatctcggctcacggcaacttctgcctccagggttcaagcgattctcctgccccaacctcccaagtagctggaattacaggtgcctgccaccatgcccagctaatttttgaatttttagtggagacagggtttcaccatgttggccaggctggtctcgaactgctgacctcaggtgatccacctgcctcccaaagtgctgggattacagccatcacacccagccttattttatttttttagaggtgggggtcttgctatgttgccctggctggattcaaattcctgggctcctgcctcagcctccggagtagctgagattacaggcaggtgccactccatctggctccctggattattttaaagcaaatcttaggctttatattattttttatttattaaaacttagatatatatatatatatatctctctataagataaatacttttatttcatttatttatttattttgagacagagtttcactcttgttgcccaggttggagtgcagtggagcaatcttggctcactgcaacctccgcctcccgggttcaagcaattcttctgcctcagcttcccgcatagctggaattacaggcgcctgccaccacacccggctaattttgtatttttagtagagatggggtttctccatgttggtcaggctggtctcaaacttccgacctcaggtgatccgcccgcctcggcctcccaaagtgctaagattacaggtgtgagccatcgcccccagctgagataaagacttttaaaaataactacaatatcatcatcacacttaaaaaacttaacaataatttattattatcatcttatatccaatgtttacatttccccaactgtccccttaagtgtctttttatactagaactgcacaaatcaggatctgaaaagggggtacatgttgcatttggttaatgtctctctctctctctctctctttttttttttttgagacagaatctcactgtgtctcccaggctggaacgcagtggcatgattttggctcactgcaacttctgcctcctgggttcaagtgattctcctgcctcagcctcctgagtagctgggattacaggtgtgtgccaccacgcccagctaatttttgtatttttagtagagacggggtttcaccatgttgactaggctggtctcaaactcctgacctcaagtgatccacctgccttggcctcccaaagtgctgggattacaggcgtgagccactgcgcccagccaatatgcctaactttcttttactctataaccatttaccacttcccctccccacttcctcttttctttttattgttaaagaatgcaggtcatctgtttcatattttccatatcctacatatatcttttttttttgttttgacatggagtcttgctctggggcacgtgcctatgggggatactggaaaccatttttcctgggtattgagacgtggcatgtaagttgcttccagcagccgacttctggaggctactttctcaagcctgttaggggaattgctttagaggagaatattacagtgcaggaaggctctgggggataatttggttttactgtgaaatgtttcttttctttcaccaaaagatggcagtaacctccatccaacttctaggatcctagctgcctgaaaaccgacgttcttcccatcaattgctttctcaattccataccatcattcattcatatttttgtttctttctggttttgttttccttcttggtaggagggcaaagataaaatgttcctgatagaaaaattgatcaagctgcaggatatggagaagaaagcaaaccccagctcacttgttctggaaaggagagaggtggaggtgagtctggaggctgccttggggacccctgggacacgagcttgcctccatgtaaaaagcgcgtcagagaactacagaccaagctcttgggatcatggaagggcccttcactctctgtcttaagtatttctgtggtttttacttaaaaagtaatattcatggccaggtgcagtggctcacgcctgtaatcccagcactttgggaggcctacgcgggtggatcaagaggtcaggagtttgagaccagcctggccaatatggtgaaaccctgtctctactaaaaatacaaaagttagctgggtgtggtggcacgcacctgtagccccagctacttgggaggctgaggcagaagaattgcttgaacccaggaggtggaggttgcggtgagccaaaatcatgccactgcactccagcctaggtgacagagtggcactctgtctcaaaaaaaagtaatattcattttttcagcacttttcatgcctgtactttttctaggtgctggggttacggtgaacaaaacaaagcccccgccctcatggaacttgcacgcttgtttttcacaaccccgataatacagaagtagatcccactgagatgaaaagggccctgaaatctcatctcactatgaatacttcagtgtctattctttttttttttttttttttttgagacggagtctcgctctgtcgcccaggctggagtgcagtggcgggatctcggcgcactgcaagctccgcctcccgggttcacgccattctcctgcctcagcctcccaagtagctgggactacaggcgcccgccactacgcccggctaattttttgtatttttagtagagacggggtttcaccgttttagccgggatggtctcgatctcctgacctcgtgatccgcccgcctcggcctcccaaagtgctgggattacaggcgtgagccaccgcgcccggcctacttcagtgtctattcttgcaaatctatttccctaggcatctgcaaacatacctgtatctaccaacactttaatttacttgtttattacaaaagtgaggctatattatacaaatagtatcataacttccctcccccgcagcccaccactaaatactatatcttgaacgatgtttaattctgtacatatttggatatttgggttgtttctatgtttttaaatacttaaaacagtaggtaatgaaacattttgttacaattattttttgtgcgtttataatcgcagctactcaggaggctgaggtgggaggggaggactgcttgaggccaggagtttaagaccaacatagcgagaccccatcccttaaaaaattttaataattaggcacggtggcatgcaactgtagcctcagctactcaggaagctgaggtgagaggactgctcaaacccaggagtttgaggctacagtgagctatgatcccatcaccgcactccagcttgggagacagaacaagaccctctctctaaaaaaaattaccctgggcacagtggctccctcctgtgatccccagcactttgggaggccgaggcgggcttatcacttgaggtcaggggttcgagaccagcccagcaaacatggtgaaacccatctctagtaaaaatataaaaaacaaaaacaaacaaacaagaaaacttagctgggtgttgtggtgcacatctgtaatcccagctacttgggaggctgaagcacaggaaatcacttggacccaggaggtggagattgcagtgagccaaggtcacaccattgcactccagcctgggcaacagtgcaagactccgtgtcaaaaaaaaaaaaaaattaaaaagttattttttgtgaatatttctgccacaaagcacgtacatgacaatgttaatagatattgctatatcattcccttaaaaagatttaatcaatttcattcttaccaagagaatataaagatacatgaaaccctgctctaattccaaagccttgcttgcttcctgagtgtcctgaaaatacagatgaacagtaaatccaccttaacgcaaataccacttatgttggaaattgtgatcttgacagaagtgactgacaagtaatttaccatctgtgcaaatttatactgtcagcacaatttaggtaagggatctagaggcctaaaggtagattctctgaaggtgaggaccacgtctgtgcacttgtcaccccacgtcctaatttattacctggcataatatgaatgctcagtgaatatctgtggaacggccaggtgcggtggctcacgcctgtaatcccagcactttgggaggccgaggtggacagatcacttgaggtcaggagtttgagaccggcctgaccaacatggtgaaaccctgtctctactaaaaataaaaaaaaaaaattagctgggcgtggtggcaggcacctataatcccagctactccagaggctgaggcgggaaaatcgctggaacccgagaggcggaggttgcagtgagccgagatcatgccattccactccagtctaggagataaagcaagactctgtcaaaaaaaaaaaaaaaaaaaaaaaaaagagtatctgtggaatgaatgaatggaatcactctccctaaaaaacaaaacatgttcaatatttctatggcggagacttggccttaatctctcatcccttaacttctataaaatggtgaggggctcacaaattgtgccaaatatgtgacaagacccagaatctgcattcttcctccgtgacgtggctgcttgtttttttctttttcagcaacaaggctttttgcatttgggggaacatgatggcagtcttggtgagtaattaaactgggacagaataagacactaatttatttctggtgaaatatcctaagacaagtgtaagaattgctcatgtgtccattactttttcagttgcaaattggatccaaactggcttaaacaaaattccaagaataattcttgctttaggccttgcctaacgcaggaactcacagtgtcaccagaacccggtttctttcagttccgttcttacccatgttagttccttttgcaatagactctgcctaataagtgcaagacagctttatcaacttcttatatcttctcagagtcagtctggtgggaaagactgagggacccaggattctcacggtgtttcataggatctgactgggtgatgtccccgtctatgaaccaattgttgtgggtgcaaaaatgtggcagttcccttgatcacatgatttcatctgtagatgcaggtggtgcaaccatgaagaccatagggaccaagagtagggaagggtgacttcctaaagaaaatctggggctgatgccaggagagcgaattctgggcaggaaacaaacaagcaaacccatttatttttgggggatagcatttactgatgacttccagtgatgggagttcaagggaaggattatagaaactaaaaggaagaggcaaagaaggcatgagaagctatggaatcttgaaggcaagctggtctttcccttgtagagatggggcagagtgtgcctgcgttaacttctctttcctgtgtcaaacctagacttgcgatctagaagatcagttcaagaaggtaatccaagggcctgatgactcttttggtaaccagacaccaatcaaataaggggaggagacgaaaatggaatgatttcttccatgccacctgtgcctttaggaactgcccagaagaaaatccaaggctttagccaggagcggaaactgactaccatgtaattatcaaagtaaaattgggcattccatgctatttttaatacctggattgctgatttttcaagacaaaatacttggggttttccaataaagattgttgtaatattgaaatgagcctacaaaaacctaggaagagataactagggaataatgtatattatcttcaagaagtgtgtgcaggaatgattggttcttagaaatctctcctgccagacttcccagacctggcaaaggtttagaaactgttgctaagaaaagtggtccatcctgaataaacatgtaatactccagcagggatatgaagcctctgaattgtagaacctgcatttatttgtgactttgaactaaagacatcccccatgtcccaaaggtggaatacaaccagaggtctcatctctgaactttcttgcgtactgattacatgagtctttggagtcggggatggaggaggttctgcccctgtgaggtgttatacatgaccatcaaagtcctacgtcaagctagctttgcagtggcagtaccgtagccaatgagatttatccgagacgcgattattgctaattggaaattttcccaataccccaccgtgatgacttgaaatataatcagcgctggcaatttttgacagtctctacggagactgaataagaaaaaagaaaagaaaagaaattagctgggtgcgatggcttatgcctgtaatcccggcactttgggaggctgaggcaagcggatcacttaatgtcaggagttcaagaccagcctggccaacatggtgaaaccccgtctctactaaaaataaaaaaactagctgggcgtggtggtacatgcctataatcccagctactcgggaggctgaggcaggagaattgcttgaacctgggaggcagaggttgcagtgaggcgagattgtaccactgcattccagcctgggcaacagtgagactctgcctcaaaaaaataaataaataaataaataaagtaaattaaaagtcttattcaaaccaaatatgaaactggtggtgatgtgtggaatgtgtgtgtgtgtgcacatatgtaatgaatacgtgtgtgtataatgtttttgcaggtttgccaaatgattcacaagccacgtggctgttcttaacactgaaaggtccagcagaaaggtgcagttactcaggagagaggagcctcctcttaagtaatcactcgcataaaacctaattggaactgaatttagaaagcagttaagatacattcgaaacacaagcacccaaccagtgctgtcatttattcccttttttttttatttttaagagataaggctgggctgtgttgccagctttgactcaaactcctaggtcaagcagtcctcccacttcagcctgccaagtagctgggactacaggcacacgccactgcacttgaccacgcactttttcattcacttatttttttcattaattcacttcatcggaggaattaatttcttttggtgtcatctttggtaacagttgtatgtagtgttcatccatccattcattcaacaaatatggaccaaatagtggtgagcaagatggtgaacaattcatggtgctgcctgtctagcaggtttagacatgaatttaattcttaagcaataattaattacagttgtagtagatgctctgaagaagcacagggactaagggagacttgtctgtggggtcagtgcaggcaacccatggaagtgatgttggaagtgattttattccccttggggtcatcttagtgctgtttgtgcttttttctttgcttttttttgagatggagttggagcctccctctgtctcccaggctggagtgcagtggtacaatctcagctcactgcaacctccccctcctgggttcaagtgattctcctgcctcagcctcccgagtagctgcgattacgggagcgtgccaccaggtccggctaatttttgtatttttagtagagacggggtttcaccatgttggctgggctggtgttgaactcctgacctcagatgatccgctcgcttcagcctcccaaagtgttgggattacaggcgtgagccaccatgcccggctgctgcttgggcttctacaatgaaatctgaactctctctgaaagcatcacttctgctcattcaccagatgctaagtgcttccatctagaatgcttctcccttcacctccatcccttgtctccacttcagtgcagccctgcttctcctggaggtgtacatgcagtggatagtggctcatgcctgtaatccccgcactttgggaggctgaggtgggcggatcacctgaggtcaggagttcgagaccagcccagccaacatggtaagaccttatctctactaaaaatacaaaaattagccgggcgtggtggcaagcgcctgtaatcccagctactcaggaggctgaggcaggagaattgcttggacccaggaggcagaggttgcagtgagctgaaatcgcaccactgcgcttcagcctgggtgacagagtgagactgtctcaaaaaataaagaaactactgtacatggaaagcattttaaacagtctaggacatggtaggcagtcaataaatgttaattagcaaggattttacatgcactctttcatttaatcactaccaccgcaagaatactacccctattttacagataaattcagtaacttacccaaggtcatatagctggtaagttgctgaataggaaggcagacttggctttctctgattccaaatcctgttattaaccctatactaagccttccaaggaagtgcttaatagtagttattaataccttatttcatcattcaaattctccaccttttgaggccctgaccatcttagcataggacctaaatccttaatttggcctggctgaatcaaaggtaaaatggatttgggataaagatcaagagacagagatctcatggctctccagagatcttcccacaacacaaagggatattattattattatgaaatttttaaagattggagtcaaactctgtcccctaggctgtagtgcagtggcacgatcctagctcactgcagcctcaacctgctaggctccagtgatcctcccatctcagcccctatttgtaaattttttgtagagatggggtctcactatgttgcccaggctagtgttgaacagcctgttgaacagctagtgttgaacagaggtatcttttttttttttttttttttttttttgagacagagtcttgctctctggcctaggctggagtgcagtggtacaatcttggctcactgcaacctctgactcctgggttcaagcaattctccttgcttcagcctcctgaatagctgggattacaggcatgtgccaccatgcccaactaatgtttgtatttttagtagagatggggtttccccatcatggccaggctggtctcaaactcctggcctcaagtgatccacccacctcagctcccaaagtgctgggattacaggtatgagccatcacgcctggcctgatgtatcttctttggtcactttttcctcctcctttcactctagtcataacatggcacggaagtacatgcagtttagacatttgttgcactcaatgaacaaatctttgttgtttattttaaaattcaagacaatttttttgcaaatgctgattcaaaacgtaccaatccccatctatcatgcctatgccaatacaatctgtcacaaaaaagtttgcttctcattgtcacatagctatggggactggtggccttctaaaatcactgtccagctgctgcaagtgtgaggccagcaacccacggcagggatgcaggagggaagccatggctaagctgtgggcctggacaaaggccacagatggggttgaaaggtgagaagcggtaagctagaggagacagacggcgttgccattaaaaacaattcaacttcattttaatgttgctatgtaagttcacaataaaatccctggaagttcaaattggaaagagcagtttggggtcatgggctcaacaatataaaggcagattcagtgaggggtaagggtagtggctctgggggcagactgacctagatttgaatgccagttgtaccagactcaagacaccttgggtaagtggttttatgaagtacctcagttcttcatcagtagaaagagtgctaacacctccataagacttttgtatggattgagtaagataatgcatgttaaaccacttgtatagtttctggctaactgtaaacaagatgttctagaagttctagttatctttttttttttttttttttttttttttttaagagtcaggttctcactgtgccaccaaggttgtagtgccgtggtgtaatcatggctcattgcagccttgaacttctgggctcaagtgatcctcccacctcaacctcctgagtagctgggaatacaggcatgcaccaccatgcctaattttttagagatggggtcttgctatattgcccagtctggcctcaagtaatcctcctgcctcagctttctgaattgctgggattatcggcatgagccactgtgcccagctaagctgtgacttttgaggcaaccccttcccttccacagagtttagtttcctcatttgtaaaatgaggacaaacctagatatttttggaagtttcttccagttctaattgcctatgatcagatcacatctgttgcagagcttcctaaaaagcctggaaaaatgcaactctgccccctggtggtttgcagctctctattcaagatgctataaatccctcattggcttcaagacctccctaccattttggttgctgtacactgaagcctcactggattgcatggtggcttccccaaattccgtatgccttaggatatgatgcttggcacacagttttcctttagtgctccttttaataattttattagtatggccacaagtttgatgtctacagtacatgttaacatagctgagtacaaatatttgaaataagtgtggcaagttttaaaatgtcaactctgagttatcatgcatgtcccatgcatttacatctgcatctgcaaactgtacaattcaatctgtgcttatcctcactgggtctccctgtgtgcctcagctagggcagggcaggggctcttgtgcgttttttcagacccagattttcaagagcaacagtgttgaactctggcatgccatggtgcatggtggcaacaccgggtttagctttggttcaggtaaaaatgcagtgaccaactattgcatttgtgtgagtcacctgattccccagggcctgggctagcacaaagggtattttgatatccctgtatgaggcccctggcagtttctgaacccgtttcgtcccaccgtgaaagtctagaagtgaggttcgcagtcttctaccatgctgtcagtgatatagctggaaccaagatgggattcgtagtaactcttttcatcaaaggtattaacagtccaaccaacaacctggattcctttagc

SEQ ID NO: 2234 - protein, 620 aa, Homo sapiens
MATLCQVLLEVAMAYRRSKNSLSEILNSISLWQKTLKIIGGKFGTSVLSYFNFLRWLLKFNIFSFILNFSFIIIPQFTVAKKNTLQFTGLEFFTGVGYFRDTVMYYGFYTNSTIQHGNSGASYNMQLAYIFTIGACLTTCFFSLLFSMAKYFRNNFINPHIYSGGITKLIFCWDFTVTHEKAVKLKQKNLSTEIRENLSELRQENSKLTFNQLLTRFSAYMVAWVVSTGVAIACCAAVYYLAEYNLEVTNTRVQGRENQFLKTHSNPGAVLLLPFVVSCINLAVPCIYSMFRLVERYEMPRHEVYVLLIRIGIFFCPLLPFIQMIMLFIMFYSKNVSQSDIAINQLCSVTCDLVALKAGEGGSAKVSGSQAWLGSLCRCSGCRWEVAASLSSDQPDDEFPASEQSLAGLTDDDFLHLLALFPILHRGLVHPGHHHLEVGEGGLGGGFRDWVDGLKPSADCGPFRGLPLFIHSIYSWIDTLSTRPGYLWVVWIYRNLIGSVHFFFILTLIVLIITYLYWQITEGRKIMIRLLHEQIINEGKDKMFLIEKLIKLQDMEKKANPSSLVLERREVETQIFKSNSVELWHAMVHGGNTGFSFGSGKNAVTNYCICVSHLIPQGLG

SEQ ID NO: 2235 - DNA, 1886 bp, Homo sapiens
  source (1)..(1886)
  CDS (201)..(712)
  CDS (1071)..(1686)
  modified_base (52)...(151): a, t, c, g, unknown or other
  modified_base (1015): a, t, c, g, unknown or other
  modified_base (1177): a, t, c, g, unknown or other
  modified_base (1179): a, t, c, g, unknown or other
  modified_base (1194)..(1195): a, t, c, g, unknown or other
  modified_base (1212): a, t, c, g, unknown or other
  modified_base (1218): a, t, c, g, unknown or other
  modified_base (1306): a, t, c, g, unknown or other
  modified_base (1359): a, t, c, g, unknown or other
  modified_base (1387): a, t, c, g, unknown or other
  modified_base (1410): a, t, c, g, unknown or other
  modified_base (1418): a, t, c, g, unknown or other
  modified_base (1448): a, t, c, g, unknown or other
  modified_base (1465)..(1466): a, t, c, g, unknown or other
  modified_base (1483)..(1484): a, t, c, g, unknown or other
  modified_base (1495): a, t, c, g, unknown or other
  modified_base (1529): a, t, c, g, unknown or other
  modified_base (1535): a, t, c, g, unknown or other
  modified_base (1553): a, t, c, g, unknown or other
  modified_base (1557): a, t, c, g, unknown or other
  modified_base (1571)..(1572): a, t, c, g, unknown or other
  modified_base (1576)..(1675): a, t, c, g, unknown or other
  modified_base (1711): a, t, c, g, unknown or other
  modified_base (1778): a, t, c, g, unknown or other
aagggaagaagcctggagggcagaatagaggtgagttctgaaaacagaaagnnnnnnnnnnnnnnnnnnnnnnnnnnnnnnnnnnnnnnnnnnnnnnnnnnnnnnnnnnnnnnnnnnnnnnnnnnnnnnnnnnnnnnnnnnnnnnnnnnnntggtgttgcggcggctgatctcgggttcttcgtgtagtctgtccgtttcatggcgtcgctgttccttctgtcgctcgttgtgtccctgcgccgtctctgctgcgttcttcctctgtggtcgctctcttctctctttggtctctctcccgtatttctttgtgttcactgtggtccttctggcgttctatcgccggatgccctttgctttcgtctgctgttgtcgtttccttctcttgtgtgcgcgttgtcgtgttctctcgcgcctgccgtgctcctcggtctccttctgcggtgcgtcccgcctcctgttttccccttgcgtcttgtgctctgtgtgcattgttcctgctccgtgtggtctgtgtcgccctggtcgtccgctcttctgttctgttgtcctgctgccggtgtttcgaatcttctctcctccggccgtttcgcctgtctttgtgcgcgttgcgggtcgtgtggcgtcccccggggtgttctcgtgtcgcttctgctccgcgtcttctgttgcgtgtcggtcttctctcgcgctttcgggtctttccctccgcggtgcggttgttgggtttggcgcctccgttttcctgtttgtctgtttggccgtgccgtttttccggtgtgtggctgtggttgtcttcctgtttgtcgcgcctgtgtggtttccttggggtcctccgcctggtctccttttttgtcctgtcgggtttcgccccctctgccttgtgcgtcgctttttgtgttgcttgtctcgggggcgtggcttttgggttcctgcctgctgcgcggcctttttccggttcttggccttttgctggccttttgctcccttgttttttccctgcggtttccccctgnttctgtgggttgccggtttcccgccttttgtgtgtgctggttccgttcgccgcagccgtccgcccgggcgcagcgagtctgtgtgcgtgcctgcggtcgtgcgccctttcgctatccgcctctccccgcgcgttggccgtttcattaatcaagcagacacgncnggtttcccgactggnnggcgggcagtgggcgcnccgctnttgttgtgggttggctccctcgttgggctccccgggctttcccctttgtgcttccggctcgtctgttgtgtggctttgtgggcggttnccgttttctctcggggcctggctttgcccttgtttcgggtttggggctcggtncccggggttcttctggggtcccgtttgnttgttgccgggttgcccttgttnggcgttgncggcggcttttgcctctccgggggcgggtnggcgggggtgtcttgcnnggtccggggtcccgtgnnggcgggctttntcgcggcgccgggctcgggaccggtcggtggcgntccggnctttgtgctcgtcgggcntcgnttcttcttcggttnntccnnnnnnnnnnnnnnnnnnnnnnnnnnnnnnnnnnnnnnnnnnnnnnnnnnnnnnnnnnnnnnnnnnnnnnnnnnnnnnnnnnnnnnnnnnnnnnnnnnnncggcgttctaatatggtattgtgactcgtcctagtntcttcgtagatcgtgtcgtatgcgtcatgtgttatcgagagatatgtgcgcgtcgtnggtcactcgtctctcatgtagaagagagcgtgtctggtgtgtcagacttaatgagacatatgtgtacgggtatatgtctttgtacgcgtatgcaatggttttttcgtgaatgttagaa

SEQ ID NO: 2236 - protein, 375 aa, Homo sapiens
  MOD_RES (207): Variable amino acid
  MOD_RES (212)..(213): Variable amino acid
  MOD_RES (218): Variable amino acid
  MOD_RES (220): Variable amino acid
  MOD_RES (250): Variable amino acid
  MOD_RES (267): Variable amino acid
  MOD_RES (277): Variable amino acid
  MOD_RES (284): Variable amino acid
  MOD_RES (287): Variable amino acid
  MOD_RES (297): Variable amino acid
  MOD_RES (303): Variable amino acid
  MOD_RES (309): Variable amino acid
  MOD_RES (313): Variable amino acid
  MOD_RES (324): Variable amino acid
  MOD_RES (326): Variable amino acid
  MOD_RES (332)..(333): Variable amino acid
  MOD_RES (338): Variable amino acid
  MOD_RES (340)..(373): Variable amino acid
MASLFLLSLVVSLRRLCCVLPLWSLSSLFGLSPVFLCVHCGPSGVLSPDALCFRLLLSFPSLVCALSCSLAPAVLLGLLLRCVPPPVFPLRLVLCVHCSCSVWSVSPWSSALLFCCPAAGVSNLLSSGRFACLCARCGSCGVPRGVLVSLLLRVFCCVSVFSRAFGSFPPRRPPGRSESVCVPAVVRPFAIRLSPRVGRFINQADTXGFPTXXRAVGXPXLLWVGSLVGLPGLSPLCFRLVCCVALWAVXVFSRGLALPLFRVWGSXPGVLLGSRLXVAGLPLXGVXGGFCLSGGGXAGVSCXVRGPVXAGFXAAPGSGPVGGXPXFVLVGXXFFFGXSXXXXXXXXXXXXXXXXXXXXXXXXXXXXXXXXXXAF

SEQ ID NO: 2237 - DNA, 1057 bp, Homo sapiens; identical to SEQ ID NO: 2103
  source (1)..(1057)
  CDS (201)..(857)

SEQ ID NO: 2238 - protein, 218 aa, Homo sapiens [sequence omitted]

SEQ ID NO: 2239 - DNA, 1222 bp, Homo sapiens
  source (1)..(1222)
  CDS (201)..(1022)
  modified_base (238)..(337): a, t, c, g, unknown or other
tacagtcttaggggtcgccacttggctcttagcaactagtcggtgcatggtcgggcatcactctgacttagcgatcctatgaggagtacgacgttccacagtacctaccccaccaggtcctagggtcatactatgaagtagattattctcggtataataatttaagggggtatttcatatatgtacgcttcatctattatatggtacttagtttcattactctgccttttttttcttnnnnnnnnnnnnnnnnnnnnnnnnnnnnnnnnnnnnnnnnnnnnnnnnnnnnnnnnnnnnnnnnnnnnnnnnnnnnnnnnnnnnnnnnnnnnnnnnnnnntgtttgctgtccttgttcttgtttccttctctctgctgctcttccgtgcctggttttcgtctttcggtcccgtcccgttctttatcttgtcctttggctgcggttgcgtggctttccgcttctggtgtctctgccgtttgttttctttcagtgtcgtgcctgtccgcggttgtttgcttgcgttcttgttctttttgtttttgtttttctgtgctctggtgcggtcttgcttggtgcgttggctccgctgctctttgtgtgtgtggtctggtgggtgtttgttcttggtttctttgtttggttttgtttgtgtgggtgggtttggttgtttttggtggctggccttcgtttctgtgttgtctggctttgtcttattgctttctgttttttctcatttgggttttctcttgtgtgggttgattggatggggggtcctgggttgtttttggttctgtgttgtgttttctgtgttggcctcgtgttttgttctgctcgtgtggggtcgctggtgaggtgtggttgtatctcagtgtgtgttctgtcgtgccggtcgcctcttccggggtgtgtggcttgggggtgcctgcgtgccttggtagtgggggtgcgtttttgtgttcgtccgttctgggtatcggccgggtatggtccccgttgttttgtatcaattgtgttccggtggtagtgctcagggtctgtggctagcgcacagggggtgcgtattgcttaggagctgggggtgcatggaaggtggtttagaacacaagggtggtctttgaggtaagggttacaagtggtagggaaggtagttactgggtggggttggggttaggtgttggtatggtatagacactgtccagtgtggttgtcagtggcataggggga

SEQ ID NO: 2240 - protein, 273 aa, Homo sapiens
  MOD_RES (13)..(46): Variable amino acid
MVLSFITLPFFSXXXXXXXXXXXXXXXXXXXXXXXXXXXXXXXXXXVCCPCSCFLLSAALPCLVFVFRSRPVLYLVLWLRLRGFPLLVSLPFVFFQCRACPRLFACVLVLFVFVFLCSGAVLLGALAPLLFVCVVWWVFVLGFFVWFCLCGWVWLFLVAGLRFCVVWLCLIAFCFFSFGFSLVWVDWMGGPGLFLVLCCVFCVGLVFCSARVGSLVRCGCISVCVLSCRSPLPGCVAWGCLRALVVGVRFCVRPFWVSAGYGPRCFVSIVFRW

SEQ ID NO: 2241 - DNA, 1678 bp, Homo sapiens
  source (1)..(1678)
  CDS (201)..(1478)
gccccaggtctggtattggtggagttgtccccaggtctggtcattggtggagttgtccccaggtctggtcatggtgcagtgccccaggtctggtatggtggagttgtccccaggtctggtcatggtggagtgtccccaggcctggtcatggtggagttgtccccaggcctggtcatggtggagtgtccccaggcctggtcatgggtggagttgtcccaggtctggtcattgggtggagttgtcccaggctggtcattggtggagttgccccaggtctggtcattggtggagtgtcccaggtctggtcattggtggagtgtcccaggctggtcataggggagttgccccaggtctggtcattggtggagttgtcccaggactggtcattggtgcagttgtcccaggcctggtcattggtgcagttgtccccaggcctggtcattggtgcagttgtcccaggctggtcattggtggagttgcccaggtctggtcattggtgcagttgccccaggtctggtcattggtggagttgccccaggtctggtcatggtggagttgccccaggcctggtcatggtggagttgccccaggcctggtcattggtggagttgccccaggtctggtcattggtggagttgtccccaggtctggtattggtggagttgtccccaggtctggtattggtggagttgtccccaggcctggtcattggtggagttgtccccaggcctggtcattggtggagttgccccaggcctggtcattggtggagttgtccccaggtctggtcattggtggagttgtccccaggtctgggtattggtggacttgccccaggtctggttattggtggacttgccccaggtctggtcattggtggagttggtcccaggtctggtcattggtggagttgtcccaggtctggtcattggtgcagttgccccaggtctggtcattggtggagttgccccaggtctggtcattggtggactttccccaggtctggtcattggtggagttgccccaggcctggtcattggtggacttgccgcaggtctggtcattggtggagttgtccccaggtctggtcattggtggagttgtccccaggcctggtcattggtggagttgccccaggtctggtcattggtggagttgtcccaggtctggtcattggtggagttgtccgaggtctggtattggtggagttgtccccaggcctggttattggtggagttgccccaggtctggtattggtggagttgtccgaggtctggtattggtggagttgccccaggctggtcattggtggagttgcccaggctggtcattggtggacttgccccaggctggtcattggtggagttgtccgaggtctggtattggtggagttgccccaggtctggtattggtggagttgccccagttctggtattggtggagttgccccaggtctggtcattggtggacttgcctagggctggtcattggtggacttgcctagtgctggtcattggtggacttgccccaggtctggtcattggtggagttgccccaggtctggtcattggtggacttgccccaggctggtcattggtgtacttgccccaggtctggtcattggtggagttgccccagtctggtcattggtggagttgtcccaggctggtgattggtg

SEQ ID NO: 2242 - protein, 425 aa, Homo sapiens
MGGVVPGLVIGWSCPRLVIGGVAPGLVIGGVSQVWSLVECPRLVIGELPQVWSLVELSQDWSLVQLSQAWSLVQLSPGLVIGAVVPGWSLVELPRSGHWCSCPRSGHWWSCPRSGHGGVAPGLVMVELPQAWSLVELPQVWSLVELSPGLVLVELSPGLVLVELSPGLVIGGVVPRPGHWWSCPRPGHWWSCPQVWSLVELSPGLGIGGLAPGLVIGGLAPGLVIGGVGPRSGHWWSCPRSGHWCSCPRSGHWWSCPRSGHWWTFPRSGHWWSCPRPGHWWTCRRSGHWWSCPQVWSLVELSPGLVIGGVAPGLVIGGVVPGLVIGGVVRGLVLVELSPGLVIGGVAPGLVLVELSEVWYWWSCPRLVIGGVAQAGHWWTCPRLVIGGVVRGLVLVELPQVWYWWSCPSSGIGGVAPGLVIGGLA

SEQ ID NO: 2243 - DNA, 1084 bp, Homo sapiens
  source (1)..(1084)
  CDS (201)..(884)
ttctcttttccttctgttcttggatgctctgccttcccctccctgctgtgtgtacatgtgcgtgtgtgtgtgtgtgtgggcatgcacgtgtgtgcacgtgtatgtgtgtgtgtgtgcatgcgcctgtgtatgtgtgtgggcacgtatgtgcttgtgcatgtgtgtgattagcgtgtttgcgtgtgtgggcatgcacgtgcatgtgcatatgtgtgtgtgggggcgtgtgtgtgcgcgtgtgtgtgtgtacgtgtgtgtgcatgtgtgtgtgggcatgcacgtgtttgtgcttgtatgtgcatacatgtgtgggtgggtgtgtgcacgtgcgtgtgtgtgcctgtttgtgcacgtgtgcatgtatgcgcatcgggtcttgcacgtgcacctgtgactgtgcatatgcatgcatatgtatgtttgtgcacgtttgtacatgtgcgtgcatgtgtgtgcgtacgtacgtgtgtgcatgtgtgggcgtgcacgtgcatggtgtgtacttgtgtgtgcatgcacatatgtatttgtgtgtggacatgcacatatatgtgggtgtgtggatatgtgtgcatgtgcatgtgtgggcatgcacatgcatgtgcatatatgcgtgtgtgggcgtgcatgtgtgtatgcatgtgtgtgggcgtgcacatgcatgtgcatatatgtgcgtgtgtgggtgtgcatgtgtgtgcctgtgtgtgcatatgtgtgtgcgtgtgtgggcatgcacgtgcgtgtgcgggtgtgcatgtgcgtgtgcatgtgtgtgcacaagtttgtgcatgtgtggtgtgcatgtgagtgcatgtttgtgcatgtgtgggtgtgcgtgtgtgggcgtgcacgtgcgtgcatgtgtgtgtgttggttattaggtattgatctattctcatgttcactgaccctttcctccactgtgttgcgtctactgccccatcaaaagcatttttcatctctgtagcctggtttgacgtctttccatctggttctttcttatcgtttccatctccctgaggaaattactcatctcatcttgtacatcgtctacgttttccgttagagcccttaacatact

SEQ ID NO: 2244 - protein, 227 aa, Homo sapiens
MCICVCGGVCVRVCVCTCVCMCVWACTCLCLYVHTCVGGCVHVRVCACLCTCACMRIGSCTCTCDCAYACICMFVHVCTCACMCVRTYVCACVGVHVHGVYLCVHAHMYLCVDMHIYVGVWICVHVHVWACTCMCIYACVGVHVCMHVCGRAHACAYMCVCGCACVCLCVHMCVRVWACTCVCGCACACACVCTSLCMCGVHVSACLCMCGCACVGVHVRACVCVGY

SEQ ID NO: 2245 - DNA, 1372 bp, Homo sapiens
  source (1)..(1372)
  CDS (201)..(1172)
gtttctgcttgggaaccccctcctcaactgatacatcttgaaggcagagactacatttcggaaatcagggtgtgctgggtgtttatttctcagtgtgtccatatgtaaaatggggtgatagtagtcccagcctaagggcattgtggggacctagtgaggtgctctgtgtctcgagtttggtacattcccaggcatgtggtatgggccaagtaagcaagaactgccatcatcatcattatgccatcaccaccattgctgccatcatcaccatcactgccatcatcatcaccatcagtcccatcaccaccatcatgaccatcactgccatcatcaccatcagagccatcatcaccattggtgctatcatcatcaccatcgctgccatcatcaccattgctgccatcatcgtcaccatcggaggcatcaccattgctgccatcatcgtcaccattggtgccatcatcaccattgctgccatcatcaccatcactgccatcatcaccatcactgccatcatcatcaccatcggaggcatcaccattggtgccatcatcatcactatcagtgagatcatcatcaacattgctgccatcatcaccatcagagccattattaccatcagtgccatcatcgccaccataggtaccatcatcatcaccatcagagccatcaccattggtgctgccatcatcaccatcgctgctatcatcaccatcactgccatcttcaccattgctgccatcatcatcaccattggagccatcaccatcgttgccatcatcatcaccatcagagccatcatcaccatcagagtcatcatcatcaacactggagccatcatcaccatcagagtcatcatcttcaccaccggagccatcatcaccattgaagccatcaccatcagtgccatcatcatcaccatcagagtcatcatcatcaacactggagccatcatcaccatcagagccatcatcaccatcggtgccatcatcggtgccttcatcaccattggtaccatcatcatcagtgccatcactatctctcttatcaccattgctgccatcatcatcatctctgtcatcatcaccatcactgccaccatcatcatcatcactgccaatatcatatgcgttattattatcctttaccttagtccacctttattactttaaaggacaacctgaggctgggtaatttataaggaaaggaggtttaatcggctcacggttctgcaggctacacaggaagtatggcatgggcatctgcttctggcgagggcctcaggaagcttccactcatggcagaaggcaaaggagaccataggtgtgcagatcacgtggtgagagaggaggtgggagagttggaggtgcca

SEQ ID NO: 2246 - protein, 323 aa, Homo sapiens [sequence omitted]

SEQ ID NO: 2247 - DNA, 1300 bp, Homo sapiens
  source (1)..(1300)
  CDS (201)..(1100)
  modified_base (869)..(968): a, t, c, g, unknown or other
aatggtgccactgcactcctgcctaggcgacagagcaagactctgtgtcaaaaacaaacaaacaaacaaaaatggcaaagtatgatcttccaggtatattccactggaaaagggaagaaagcctcagatgggcatgcataccaactctttattcacactgcgtgtgtgcacagttataaaaggtaaggaagacactgcgcatgtgggctgccccaagggaagaatcgtgggaaagaggtgagcctaggatccaggttaaacgcctcgtttttgctgttttcttttgctctctattctctcttggaccttcaggtgcccgttcggcgctctgtgcctcttccccgttgccgggctcgccttccttctgtgtggccttcccccgctggcctctcctgctctcgcccttttctctccttctcttctctcttttttcttcccggcctctgccctctccttctccgccggggccccgccccttttcggcgcgggctgccgcgcgctttcttttttcttcgtgtccttgtgcgctcttctccgtttgttccgctgcctcccttgctctttttgttcctgttgttgcttctctttttctcccttctcttctctgtgccttgtccgtctcccctgcttctttttgttttcgtgttcctgctttcgcctgcggggcctggtcggccgccgtcgcggttgtggtgtttggtggtcgtgtgccttgtgttgggtgtcgggctcgcgtgggtcgcccgggggttcggtggtgtgttggcccgggttcttctgtcgctgcggtcgctcctctctgggtgttgttgctcgtcccgttcggtgggcgggtttgctgttcgtctgagacaagaagacaaaagaannnnnnnnnnnnnnnnnnnnnnnnnnnnnnnnnnnnnnnnnnnnnnnnnnnnnnnnnnnnnnnnnnnnnnnnnnnnnnnnnnnnnnnnnnnnnnnnnnnnatgtatcaatatatatggttttttatatcccatatgtatatatattttttatatatatatattatatatatgaatgtattaagtttaactcacatgatcacaaggtcccacaataggccatctgcaagctgaggagcaaggagagccagtccaagtcccaaaactgaaaagcttggggtccgatgttccaggacaggaagcatccagcgcagggtaggctggggaggctaggctagtctagtcttttcacgtttttctgcctgctttatattctagccgtgctgacagctgattagattatgcccaccaaattaatggtgggtctgctttcc

SEQ ID NO: 2248 - protein, 299 aa, Homo sapiens
  MOD_RES (223)..(256): Variable amino acid
MWAAPREESWERGEPRIQVKRLVFAVFFCSLFSLGPSGARSALCASSPLPGSPSFCVAFPRWPLLLSPFSLLLFSLFSSRPLPSPSPPGPRPFSARAAARFLFSSCPCALFSVCSAASLALFVPVVASLFLPSLLCALSVSPASFCFRVPAFACGAWSAAVAVVVFGGRVPCVGCRARVGRPGVRWCVGPGSSVAAVAPLWVLLLVPFGGRVCCSSETRRQKXXXXXXXXXXXXXXXXXXXXXXXXXXXXXXXXXXMYQYIWFFISHMYIYFLYIYIIYMNVLSLTHMITRSHNRPSAS

SEQ ID NO: 2249 - DNA, 1480 bp, Homo sapiens
  source (1)..(1480)
  CDS (201)..(1280)
ctgtcaagatgaaaagagttctggagatagatgggatatactgaatgccactaaactgtacacttcgaaatggttaagatggtaaattttatgttatatatattttaccataataaaaaaattggttggagagaagatgttggtcataaaattccacttacggatattttaggttagttctcatttttcactattgtaagatgcaccttcacatatgtatctttacacatgaatccacatttttcttgggaactctcaaagatggaattgctggatcacaaagtatgtacaattgtaattctgatacatattacaaatcatttctatatgtatctttgtatatcaacttttgtcatattacaaatcatttctatctgtatctctgtatatcgacttttgtcatattacaaatcatttctatctgtatctctgtatatcgacttttgtcatattacaaatcatttctatctgtatctctgtatatcgacttttgtcatattacaaatcatttctgtctatatctctgtatatcgacttttgtcatattacaaatcatttctatctgtatctctgtatatcgacttttgtcatattacaaatcatttctatctgtatctctgtatatcgacttttgtcatattacaaatcatttctatctgtatctctgtatatcgacttttgtcatattacaaatcatttctatctgtatctctgtatatcgacttttgtcatattacaaatcatttctatctgtatctctgtatatcgacttttgtcatattacaaatcatttctatctgtatctctgtatatcgacttttgtcatattacaaatcatttctatctgtatctctgtatatcgacttttgtcatattacaaatcatttctatctgtatctctgtatatcgacttttgtcatattacaaatcatttctatctgtatctctgtatatcgacttgtcgtattacaaatcatttctatctgtatctctgtatatcgacttttgtcttattacaaatcatttctatctgtatctctgtatatcgacttttgtcatattacaaatcatttctatctgtatctctgtatatcgacttgtcatattacaaatcatttctatatgtatctctgtatatcgacttttgtcatattacaaatcatttctatatgtatctctgtatatcgacttttgtcatattacaaatcatttctatctgtatctctgtatatcgacttgtcatattacaaatcatttctatctgtatctttgtatattgacttttgtcatattacaaatcatttctatctgtatctttgtatatcgacttttatcatattacaaatcatttctatctgtatctttgtatatcgacttttgtcatattacaaatcatttctatatgtatctttgtatatcgacttttgtcatattacaaatcatttctatctgtgtctttgtatatcaacttttgtgactc

SEQ ID NO: 2250 - protein, 359 aa, Homo sapiens
MHLHICIFTHESTFFLGTLKDGIAGSQSMYNCNSDTYYKSFLYVSLYINFCHITNHFYLYLCISTFVILQIISICISVYRLLSYYKSFLSVSLYIDFCHITNHFCLYLCISTFVILQIISICISVYRLLSYYKSFLSVSLYIDFCHITNHFYLYLCISTFVILQIISICISVYRLLSYYKSFLSVSLYIDFCHITNHFYLYLCISTFVILQIISICISVYRLLSYYKSFLSVSLYIDFCHITNHFYLYLCISTCRITNHFYLYLCISTFVLLQIISICISVYRLLSYYKSFLSVSLYIDLSYYKSFLYVSLYIDFCHITNHFYMYLCISTFVILQIISICISVYRLVILQIISICIFVY

SEQ ID NO: 2251 - DNA, 16270 bp, Homo sapiens
  source (1)..(16270)
  CDS (201)..(286)
  CDS (2151)..(2281)
  CDS (6751)..(7016)
  CDS (7054)..(7698)
  CDS (15900)..(16070)
ggagagaaggacacagacacacacagagagacagccatgtaaagacactggaggaaattgaccatctacaagccaaagagagaggcctcaaaaggaaccaaccctgcccataccttgatcttggatttctagccccaggaccctgagaagagaaattcctgttattgaagttgatgatctgtggtcctttgttatggcagcccaagctgatcaaagataactggctgctcattccaggggagccaaatcccgtgaagacagagccttatagtgatacagtgacaatgtggaaagctttcgtgaggccagaacgaactgcattcgttcattcatttatttttcttgcagttcatctttaaatactggatgaacattgttctcagcatggggaatacaaggctgcaaagtctgtggcacacaccgtgggggtgtcagttaggtgagaggcagtccccaaaacagtgacaacgctgggctcagtgctttgaccagagtgtcccagagcaatgagggagcacaaaggagggcatttcggcagcttggggtgagagtcaatttctgccagagaaggtcccagaaccgtttgtgagagagggaggagcacagggttagtgggtcagaggccactggaagagggtgtctttgggacatgcagtctttcctcacagtggggtagcgggaggatgtgtgggcacaggctggatccctgtttggtgtagggcttgtaagcttgcactctggtcagattgcatgactctggctctgaccacagctgtgtgacttcaggaaaattatttaacttctctgggcctcatgggtcttacttgcaaggtgaggacaatcacagtacctacttcatgggctcgttgtagagattaaaggcacatgtgtatgaaaagcacttggcacagggctaggtgtgcagcaaattcttggtcaaggctgaccaccacctaggggcttgggcttcacctcaagggcagtggggagccactgaaggctttaggcagaagaatgactgggacagatatgaattttcaaaatatccctcttagttggtgggttggagatcctagctttctaatttaaggccttttattggccaggcaagtcaatgaattaataattctatacctgttggacacttaccatgtgcttttgctacattagatgactggcgaatggaaaaaagtatatataacaattaggcgctgttctaaaaaacagagcatttattttaaaattgtggcaaatactgaaaaacccgtagatatcaggatgaaatcgcttttgtcagacccaggcaaaataggcctgggaaagcgctaaggagagggcacttctgtctacgtgtctgagatacaaagtgtttccaaagactttctaaaaacccttcatgcatctcctgctttgaagaggttggacattactagacattcattaggactgcagtaaagcagataagatgctcttggaagaacacttgtccagcactggcatctccaccaatgaactgatgacaactctggctttgagcctctagaaccgatgaactttttttctctgtggattatgtaaatctctctttgctaataacagctcctccttacccttccctcaccgaatgcgctggtggcttgccattccatgcattctggactgtaattcctatttccaagtaaatccaacatatttagcgataattttctctaatgtctttttttttcaggttgacaatcacataacatttaccatcttagtcattttaagcatatggttcattaatgttaagtacattcacttgttgtacaaccaatctgcaaacgtttttcatcttgcaaaactgaaactctgagcccactaaacaactctctatttcctcctcctctggcttttggcaaactctgttctactttctgtctttatgagtttgaatattctagatgcctcgtataaattgaaccatacagtattggtcttcttgtgtctggcttatttctcacagcataacgttctcaagggtcatccatgatgtagccagaatcatggctgagaaggagccgtgtatttgtgtgcacatgtctgtctcaccctatggtgcctgaggctctcccagggctgcttgagaactgagtccttgtgtttttcaggtttggggtgatccacttggtgttcaccaacctgcttctgtgggccaacggcgtcctcaatgagtcaaagcaccaactcaatgagcacaaggaatggctcatcactctgggctttgggaacataacaacaggtgagtgctgagagaggtgagtggcccctctgccatgttggaatgtcttggaaacctgcagagtccacagtgttcagagatggagtgcaggttccaaagaacttcaggcccaccaaagtcagcatcagccagacagccccctgttgttgaaaatcttccaaaacctgaatctctcataagtgatgtgtactgagcataattaaggtttcttccatgactcagggacttgtaagacccacggtgatcattctgatggccatttctcatggtccagtttgccgcagaaataaatgtctttgttttcaactacagaagattgatggttgcctctgcttgtgtttttaattaaacctctattaccagttctttctagtaaaagtatggcttttaaaaattcataaaagtctaatggtaggttgtggttaataggctgtggttcatttaaagttttaatttaactgtagttggcttataattctagctcatgtctgttctaacttgttcctatttgagagcctgttgggttaatctttatattttcatctaaaatcctttagcatttacaatatgtcacttctatatgagaacattcaggctgaggggaatgtggggcagggaactgggtgtctcaggtttgttcccatcatgtacaagctgtgtgacctttagaagacttttaatctctctgagcctcccttttctcatttgtaaagtgagggtatccaaatcatgcacttgcaaagatcccttccagctttaacatgcagcaagtctgtgacagctgtgtgaacccaggctgtcctggagagccactttgaacctgttttgtcatcagtggggtggagacaatgaagtcaccacccccaaccagcaggcactcggtgtttgggcctcatgtcctctttggtatcaatattagtagcagcaatgacaacaataacaaaagtaaatttttattaagcatttgctgagtgcctgccactgttgttggaaatttacacatgtcatttaatttgtacccccacactctctggtaggctatatatgtgtgtatatgtatgtgtatatatatatatatatatatatatatatatatatatattgttgtttgtttgtttgttttgagacagagtctcactctgtcgcctaagctggagtacagtagcgtgatctcggctcactgcaacctctgcctcccatgttcaagtgattctcctgcctcagcttcctgagtagctgggactacaggtgcgtgccaccatacctggctaatttttgtatttttaatagagacggggtttcactatgttggccaggctggtctccaactcctggccttgtgatccgccagccttggcctcccaaactgttgggattacaggcgtgagccactgcgcctggcctcaggtagacaatattaacctcattatatggatgaaggcatcaagccacggagaagttagcccagggtaacacagtgaacatgtgatacagccatgatttgaatcctaacaatctggcttcaaggccctctgtgaaagatgaggttggattaattttctaaaaaaggactctgtcagctgtaacattctgttactctgaacttttcctcctgatttcttcccttgtcttctgcataacaccgtattgaattgtaagtgctagggaagccctgtgtgaattgaagattattactggggcagtgactcacacctgtaatctgagcactttgtaatcctaaggcaggagcattgctttagcctaggaatttgagaccagcctgggcaacaaagggagaccccagctctggaaaaaaaaaaaaaaaagccaggcatggtggcatgggctcgtggtcccagctatagctacatgggagactgatgcaggaggatcacttgagcccaagaagtcaaggctgcagtgagctgtgtttgtgccactgcactccagcctgggcaacagagggagaccctatataaaaaagaataaaaaaagaaaaagaaaatttcatagtgttctgtgaaagtaaaattaatgctacgatatagtttttctcagattttttttttttttagacggagtctcgcttgtcgcccaggctggagtgcagtggcatggtctcggatcattgcaagctctgcctcccgggggtcacactcttctcctgcctcagcctcctgagtagctgggactacaggcgcccaccatcacgcctggctaattttttgtatttttagtagagacagggtttcaccatgttagccaggatggtctcaatctcctgaccttgtgatctacctgcctcggccttccaaagtgctgggattacaggcatgagccaccacacccagctgcttttctcagattttgtaagtaatatatacatatcataaactaaaacaatgacaaagtgtgaagcaaaaaaatccacaacacttacccagaaatgcagtaagtgctgcgaatgtttggttatttttttgtagtgtgccatttatttatagttgattttatactatatatttgatctttttttattgcaaccttcaataagagacagattttacactgtaatccaaacacacacatacttatgtgtgtatgcttgatgaaataatacttaattttactgtatcagagatgcttccaaattttatcggagttgattccactccattctatcccattctagtccactgaaaattatttctgctacaaaaaagttggttgctacctgattttgcagccttgtactgggttgtgacttgcattaaagaaatatacagtttgttcttacttttttccattttccttgaaacgagattactttcttaatattaaaacacatcctggctgggtgcagtggctcatgcctttaatcccagaacttcgggaggctgaggcgggcagatcgcatgagctcaggagttcaagaccagcctagccaacatggcggaacgttgtctctacaaaaaatataaaaattagctgggagtggtggcatgggcctgtggtcccagctactcagcaggctgaagtaggaggatgcttgagcacagaaggctgatgttgcagtgagccaagattgtgccacagcactccagcctgggcaacagaggaggctctgtctcaaaacaaacaaaaaacaaaccccccccccatacccaaaaccataaagcacatcttaattataacgtgcagtggctgtctactatctcattgttgggatatactaaaatttacttaacaatttctaaattgttggactttgagctgttcctctctctctctctctctctctctctctctgtctctctctctctctctcacacacacacacacacaaacacacacaattttacctgactttttttaaattattttttgagactgagtctcactctgtcacctaggctggagtgcagcggtgcgatctcagctgactgcaacctctgcctcccaggctcaagcgattcttctgcctcagcctccccagtagctggtattacaggcttgccaccacacctggctaatttttgtagttttaatagagatgaggtttcaccatgttggccaggctggtctcgaactcccgacctcaagtgacccacatgccttggcctcccaaagtgctgggattacagggctgagtcaccactcctggccttacctgactctttgattacatttttatttgtccctttgagtagaagggtagaatggaaagaatggaattatgggtcagagactgcatcgccttcagggctttggtgacctgtttcgtcatttacttgcagcatctgccctcctgtgatgagagggccctccatatgacagccagcttctcttccagaaggtggtgcccgtttactttccccgcactgatatcagagagcacctgtctcctgcatgcttgctagcactggagtcttaagaggcatatcttttgctaattaaaaggggcattttctccagaaagtattttttaaaaataatcttaaaaaatcacacatgtaaatcatcttcacagaaaaaatttagaaaatacagggaagcaaaatctagaagaggttaaaaatcatctgtcatttttccacccagagataacaattgttgacattttagtttgtgtccttccaggttttttctgtctgtctgtgtgtgtgtgtatccatctatctatctatcatctacatatctattttttacaacaatagagtcatcttctctatcctctttggcaactcaccaaataaatgtgatttaggtaatgaatatgctttggggatactcagggctatcaaattagccatcatattaaacgtgataataagccatgacatgaaaaagcttgtaatccagtgggaagactcaagcctgaatccacagtggaaacagttttctgtgcttttctgcttccccttgcacctgctaatagcccctctgtgtgatcaacctgtctcccctagttttagatgaccacacaccgcagtgtaactgcacgcccccaactctctgcaccaccatctcccacgggatctactataactactacctctaccccttcaacatagagtatcagatcctggcctccacagtgctctacgtcctatggaagaacatcgggcgcaaagttgacagccatcagcaccagaagatgcagttcaagcctgatggggtcacggtgggcacagtcctgggcctgaccgcgctggctgccaccattgccgtggtggtgggtggtgcacctgattcatattgggtgctccaagaccaagagcgagtcagcactcatcacgttctacctgtatgtcatcaccctgatgatgcttatgggggctgcggggctggctggaatccggatttacaggacagatgagaagtcactggatgagtccaaaaatccgccccgcaaactggactcggacctcttggtgggcactgcctcaggctcctggcttatctcctggggctcaatcttggccatcctttgtgccgaggaccacccccactacacctggtacaacctgccctactccatcgtggtgatcatggagaagtacatccagaacctcttcatctttgaatccattcaccgagagcctaaaaaactctctgaggacatccaaacccttcggatggtcacagtctgcaatggcaacaccatgtcccttgcttcctcctgcctcaagagtggagttgtggccggagacgtggctccctggggcagggacatgccaccagcagccaatggaaatgtgtgcctgagagaaagttgtgacaaggaggagaagcaggaggagagcagctggggagggaacccaagcccagtccaccttcctcgtttcttacagggcaacgccaagagaaaagtcctgaggaatattgcagccttcttgttcctctgcaatactttggtaatctgcaccaagttattcttattcttttaattttgctgtaaactttcattttaggttcaaggggtacgcatgcagatttgttacatgggtaaattgcgtgtcgctgaggtttggtgcacaaatgatcccgtcacccaggtaatgagcatagtacccgataggtagtttttcaccctgcaccccacttctgacctctccccctagtagtccctagtagtgtctattgttcatatatttgtgttcatgactaccattagctcccacttataagagaggacatgaggtatttggttttctgttcctgtgttaattcacttaggataaggactccatttctatccaggttgctgcaaataatgtgatttcattcttttttaaggctgcataatattccatggtgtagagctaccacattttctattttttttttttttgagagagggtcacgccccattgcccaggctggagtgcagtggcatgatcacagctcactgcagcttcgacctcctgtgctcaagcaatcctcccatctcagcctcctgagtacctgggaccacaggcatgtgccactacacctggttaattttaaaaactttttttgtttttgagacagagtttcactcttgttgcctaggctacagtgcaatggtgctcactgcaacctctgcctcctgagttgaagtgattctcttgcctcagcctccagaatagctgggattacaggcacctgccaccacagttggctaatttttgaaaatatttttagtagagatgggggtttcaccatgttggccaagctggtttcggactcctgacctcaagtgatccacctaccttgacctcccaaaatgctaggattacaggtgtgagccaccatgcctggccaaaactttttttttttttttttgtagagataggttctcactgtgctgcccaggcttgtcttgaactcctgcgctcaaacaatcctcctgcctcagcttcctaaagtgctagtattacagatgtgaaccactgtacccggccataatacattttctttatccagtccattattgatggacatctaggtttctcttgcctttttaaaataaggaatggaggcagcttgtaataaaaatactgtaagtataaaattacaatataaggctggaaaatagacctatattctacaaatctacctactgaagacttgctgtgtgctaggggctgggctaggtactaaagattaaagtggaaagactcagtctctttcctctaaaaggtctcagtataatgggggagggagacaatgagcaaatctaatatagtgaacaggacaagtgctgagatgggcttgtgcaaggtgtactaggagcagggatccagaaggacttcagtgagtagtgagtgcttgaggtgaggcccagtgtcaatcaggagtgcttttagttgcaagtgacaggcaatttgattcacagtgtcttcagtcttatcaatgtttaattatctcctgagaattccagaggttggctgcttggggttggcctggcagctgaaccgtgtcatcaggcatccaggcactgttcatcttgtcacttgggtcgtgtggtgtttgttgcgacatggtcatgagatggctgcagctgcaccaggcatcacatctgggttcaagacagaaagcagtggggaagggctggtgccagacaatgtctctcatgtgggcacccctcactgcaagggaggctggggaagtggacggtttgcttcccagcctctctgatggaaggtagcaagggagaggaaggtgtacagtcactcacccatctgtctgcatcagcaaggaatgactggaagttcaccaggttatcaaggcggggaaaagcatttcaggcagagacacacaatatgtgaagacacagaggcaaaagacaccatggcatgttttgagagcaccaagtagtttggcataaattccatgtgtgttaagcagagtagcagaatgggaaataggagagagggcccaggtaggtggactctggcttgagcagggcttcctaggcctggctggagtctagtctttatgctgagggcaagggaagactctctcagatttgtgttttggaatgatcctcccagtagctgtgtgtagcaaggatggagacagatagggccagaagcagaaagactgggagagaaagccctgcaacagcccaggcaggaaggggaggagcttgaactagggcagtgatggagggatggagagaagaaaaaggaataagaagcattgtgtgctgttgggatttttttaaagacacataaaggaaggatggtgggggtcagtaagaaggagggggaagcagcctttgccaccgcatgagtctctgcagtgatggtgactggtggctggaggggagtgccccagtccacagaggtgcctgcccatcactctgggtgaagtcagctctgtgctactagcctctgttatcaagcctgctccctgttgccccagcagctcagaggcttttgagcttcctcccctgaatttcagatggtgcatatggggcctgcagcttttgatatcaccctaagaacacaaagttgggaaagtaagtcccttctaaagtcagaatggctgtgtgtctgccaagcaaacctgatccaccctagccttggatcacccaggttccttcagtttgctaggcagtgaggaggggctctgaaggtggaaggcccagaagagtttggctgcagggagaccctcttctccatctaacagacatttgccaggcacctgctgtatgccagggactatgtcaggggcacagcagtgagtcaaaaattgaaagagttaacaagagagatagatactgtaagctgcatttttttgaggtgcatattccaaaatgcaaattcttataaagtcagagctagttctagaatcttcctcaagtatatgctttttgtacatatcctgtgattaatattaatatacatatattttgagatggagtcctgctgtgttgcccaggctgtagtgcaatgatgcgatctcggctcactgcaacctccacctcctgggtttaagtgattctcctgcctcagcctcccgaggaggtgggactacaggcatgcaacaaccatgcccagctaatttttctacttttagtagagacagggtttcactaggttggtcagggtggtctcgaactcctgacctcaggtgatctgcctgcctaggcctcctaaaatgctgggattacaggcgcgagccactgcttctgacctaatatttctttttaaaactaagttctgaaaagttgtctttccctggttgcctttttggttgaccactgggtgaaatacttggcttgcatttttggacccacttgaagaaagatagcactgtctgaaataccagaatcaagtggcaattcatggtctgtcaggacccgaaagccagacccagggcccagtccaaggagaagggtgggctccgtctcttcctccctgtgcttggcccatgatgcccccaggcactggttgggttctggggggttgaaccagaggatggaaatcatcgcagggtggagtcttaggatacccgtgctggctcatggggtggcactttgaaaccttgtggttgaccccaggtggtgccaaaggcatctggcagagagcaagagctgtcttctccagcatcgggagccagtccagaggccccagctgcaggtgctgatgtgcatgtccaggtggagtgggctccactccagagacggacatggaaatgttagttgaatttccaggagccgtggcactggagacaacagagggtggttgtggtgacggggaagggcagggtgctgtgggagatgggtcagggaaggcctcttctaaggaagggtgtggatggggctgggatgagagactatcagggcagagctgcaggtgtggggaagggacggatgcaaggcaaggcagggctcactggacatgacctgggagcacagagcagagggcagaggggagaccacacagggcctgcgagccaagactcaatcttaaatgcaacagaaaaccatggaaaggtctacactgagagtgacgggatctgactcatgcttattttgttatatttttaattgtggtaaaaaactcatcacataaacttttccattgcactcactttcaaatgtatagtggagtaaagtacgttcacattgtgcaaacatcacaccatccatttccaggttattctcatctggcaaaactgaaactctgtccccattaaatatgaactccccattctccccagcccctgacaaccaccgttctttcagtctctaggaatttgactcctagactcctcatataagtgaatttgtggagtattagtccttttgtgattaggttatttcactcatcataacaccctccagggtctccaggttgcaactcgcaaagggtgacagatgccaaacatgacccctgccttcacacttgagttcctggggagatggtgatactatgttggagatggaggactctggaggaggggcaaccttgggagcagtgggtggaggtcagtgtggaaggaagaaccagagttaagtaatgaacgtgttctgtttcaggtgcctctgtggcatccaaatggacgaacccagtagacaggtattttggttttctattgccgtgcgatgaactaccactaatgtatgacaaaagcaacatgcatgactgtttttgtcccatggcatttattgtgactcatggctttgtgggttagaaattctggcagggcttggatgggcagttctgttcctcacagcatcaagtgaagttggtgaagccttggccagaagcttcgtggtctgatgccttgggtgggggtggctgggaggctgggctcagccaggactcttgactggggcatccacaggtgggtctccagcatgacgtctcagggtggttggactccatgcgtgatggctgagggccccagagctgaccctccaaaagactgaactggaagctgcctgtctcctaaggcctgggcttggaaactgcatggtgtcatttctgccatattttattagtcatgtagtcacagagtccatctagattcaaagaaagaggtcataggccacttctcaataggataagtaacaagaatttccagccaactaaacagcacatataaagatgtggatttcagaaaagaggtcccattttcctgccttcctttcttctcccttttcctccctgtctcccttgcccttcctctcacccttcttttaaaaggtgtcccttaagtacctacagaggtacagggactgctatgaatggtgagggtacagcaatgaccaagatctctggtcttcctcttatggggcttacaaaccaggcaacagcaggtgaaaccatcaactgagcaagaaagacaccttatagtgtacccgtgttaagcagagaagtggaaaaggagggtgtgggaaatagctcttgggctgccattgtagatcagatggaccagcttagcgggaaggcctcgctgaagggtgacatgagacaggaaggggttggccacgcatgttcagggcagagggaacaacggctggtataaacccccagtgggagtgagcgggtctggtttgagaaacaggaagaagggttgcctgcaatgtgggtggggtgagtggggagaagcgtgggtggttagaaatcagctaacagagcactttatcactcagtgcgggagtgtagaatttattttaaatattttgggaagactttaggggtttaatcaaggtagggacaggatctgatttccatataatgtaaatctggtggccgagtggaaccctagttcgagctgggagaccaggcacggggccaccgccatggtccaggtgagagaggccggctggacaggtggagagagagagccacaggtgggctgaagatactgctttggaggtgcacagtggagatgcgctgagggactggatgggagagggcatggttatgagagtaggagggagataaggttgacacctggagcctcgatggaccacctgggaggacgatgtagctgagcagatggagaaatggggaaggtgggttgagtttgagatgtgttttagacacccaagttgccaccggaaactatgagtctggggttcttggaagtggtccaggctggagattgagactgggaagtcataggcctatagctggtatttacaaccagggactgggagagagccccagggttcatgtgtagagagaatagaaagggacccaggaatgagccctggatgctggctaacattaagaggcagagcaaaggatgaaacagcaaaggagactgggagggacccgccgaacaagtaggagagctcctaagagtcacagcagccagtaagcaaagcagaagagaggggtcttggttccagggcccccgtggtgtataccaaatgcacagatgctcaagtcctatatataaaatggggtaatacttgcatgtaacctacccatcctcccgtacactttaagacatctctagattacttagaatacctaatacaatttaaatgctatgtaaatagttgttacattgtattgttcagagaataatgacaagaagaaagtttgtacctattcagtacagacacaacaaaccattttatttttttaattaatttatttttattttttgagaccgagcttcactgttgcccaggctggagtgcagtggcatgatcttggcttactgcaagcttcgcctcctgggttcaggggattctcctgcctcagccccctgagtagctgggattacaggcacatgccgctacaccttgctaattttttgcatttttagtagagatggggtttcaccatgttggccaggctggccttgaactcctgacctcaggtgatccacctgcctcggcctcccaaagttctgggattataggtgtgaaccactgtgcccagcctactttttgaatatttttgatctgtggttggttcaatccacagacacaggtccctggatacagaggtcggctgtatataccagggagtgttctgtatggagatacaaatgaaggctatgtgtctcagttacgtattgctatggaagagaccaccccaatactcagcaacttaaaacaatgtacatttatgatttcatagtttctctgacttatgaatccaactacagttttagctgagtatctctgcacagggccattcccaggctgaaactgttggctggggctgcattcatttcaaggcttgactttccgagaggtggcagaggatttgtttccaaatctactcatgtgactgttggcaggattcagctgtggcttgttgggctgagggtctgagttccttgctggctgttgacaggagtactccctgggccccttgccgcgtagggtgcttcgcagcatggcagctctgccacctgtctttcaggagaagatgagcaagagggataacaggtccttttgcaacctaatttcagaagtgacttcctgtgtcttttgccatattttgtgagttggaagtgagtcgttaggtgcatcccacactaaaggggtggggactccacaagagggtgactgcaggagctggggatcattgagggtcatcctagaggctgcctgccacagccagggagtggaggaagctgaagaagggtgcagcctgaagcaggagtgaggagcctgacaactcaaggggtggcagaaagggagagaactgggacagagaagagcctgagaagcagggaacagtgtgtaggttccgtgagcaacacaaacaaaagtcactgctttcagttttgcaaacttaattctcatctaagccctctcagacacgtgttagaattcccatctttcaaatgaggaaactgaggctgggcgagggctgtagagatggagagagttggatgggttcaaagagcgctcattagggatggattgcagggaagggtgggtgaggaagtgagcaggatcatggcagacatggatttggtggtttctgtggagatgggaaatgccacgaggtctccttattgttctgtcaggggtgactcagtccccgtgcatcagggtcagctcccatgaggcctgggacttgagtggggcctccatggtggcttggaagctgctccccaccacaggccattttctcttctcttgcagctttggatacctcccgcttttggctgtcgacctgagtatgacaacggattggaggagattgtctttggctttgaaccctggataattgtggtcaacctggccatgcctttttctattttctatggaatgcacgcagctgcctccctctttgaggtctattgtaagatatagtctggttccacaagagaccgaggagtgagctaacaagagttcattggagccaactgggaatggccaggttggacaaatattgcctgacaaacatgagaagggccaccttttgtctgcaaagattgtgcttcctgtgggctggaactgcccatcacctctgatgaatgtaaacaagttagatcaaaatccataaggtggct

SEQ ID NO: 2252 - protein, 432 aa, Homo sapiens
PKLIKDNWLLIPGEPNPVKTEPYSDTVTMFGVIHLVFTNLLLWANGVLNESKHQLNEHKEWLITLGFGNITTVLDDHTPQCNCTPPTLCTTISHGIYYNYYLYPFNIEYQILASTVLYVLWKNIGRKVDSHQHQKMQFKPDGVTVGTVLGLTALAATIAVVTKSESALITFYLYVITLMMLMGAAGLAGIRIYRTDEKSLDESKNPPRKLDSDLLVGTASGSWLISWGSILAILCAEDHPHYTWYNLPYSIVVIMEKYIQNLFIFESIHREPKKLSEDIQTLRMVTVCNGNTMSLASSCLKSGVVAGDVAPWGRDMPPAANGNVCLRESCDKEEKQEESSWGGNPSPVHLPRFLQGNAKRKVLRNIAAFLFLCNTLLWIPPAFGCRPEYDNGLEEIVFGFEPWIIVVNLAMPFSIFYGMHAAASLFEVYCKI

SEQ ID NO: 2253 - DNA, 1099 bp, Homo sapiens
  source (1)..(1099)
  CDS (201)..(899)
  modified_base (97): a, t, c, g, unknown or other
  modified_base (196): a, t, c, g, unknown or other
  modified_base (729): a, t, c, g, unknown or other
tctactagctcctctccctatgttatccatttacgctcttgatctttttgtcgcattactatatttataatattcatctcttcctcatatctgtttntcctcaacgttatgattcttgctaccttttatgcctctatccttgtcttctcctcttttatatcctcctatttcgctgttttcaattccttatcttagntcttatgctctttaatgctgagtttcattgtattctagtaaccttccttctctggctgtgctctttcttccttttatactcatttatcgtattctatcgattctcatccctcatgtgtggacttatccttcgtttaacttgtaatatctttctttttctgctctatgaaatctcttatacgcgtcctgtgtttagtttccttctgctatattttctaatcccttttttgtatctatatcacttctttctcgcttttatattgccgtcttccttctctgttttactggattcatcgttatttcggtctcttgtccttcttttgttcaatctattcttgctcattttgctttatccctcctgttgctgcgtcttctttcctctttcgtgttttgtcttccttcttcttttttcgtgctgtgaatctctctatttgtcttttgtgcttgtattttctcctaccatgtttcttatctttccgttctcctctccgtctttcttttttcgctcccttctgattgtttatttctcttttntctttgtttgtatgtttcgtccccgctttgttttttgtccgctctgtgtctcttcctttgttttttctctggctctctcccatctcttctctgttctttttaagttgcctttttgccgtcgttctagtctttgtcttatctcgtatcctattcgtctctctcggtgttagtcttgttgtctcctcttttgtgctcctcctctcatttggtgtttctcctatgtttgtatgttgttcctcttattgtgtttctcttctctgtatttctgtgatcctctccgcccgcttcttctcgagtcgtttgatttgatgttttgtgttttgtggtgcccttgtgtttgtttcgttgtctctgtttcgtcgttttttgc

SEQ ID NO: 2254 - protein, 232 aa, Homo sapiens
  MOD_RES (177): Variable amino acid
MLFNAEFHCILVTFLLWLCSFFLLYSFIVFYRFSSLMCGLILRLTCNIFLFLLYEISYTRPVFSFLLLYFLIPFLYLYHFFLAFILPSSFSVLLDSSLFRSLVLLLFNLFLLILLYPSCCCVFFPLSCFVFLLLFSCCESLYLSFVLVFSPTMFLIFPFSSPSFFFRSLLIVYFSFXFVCMFRPRFVFCPLCVSSFVFSLALSHLFSVLFKLPFCRRSSLCLISYPIRLSRC

SEQ ID NO: 2255 - DNA, 1618 bp, Homo sapiens
  source (1)..(1618)
  CDS (201)..(1418)
  modified_base (209)..(218): a, t, c, g, unknown or other
  modified_base (1350)..(1359): a, t, c, g, unknown or other
acaacaaaacaaaaaaaaggccccccccaagggtgtgggggtcccgggggtttgcccccccccccccccaaggggaaaaaaattctttttttaggagggcccccttttctttagggggggaaaattttttttttctttttccaacaagacgggggaggggggccccccttccccccccccccccccggcaaggattacgaatgggaggnnnnnnnnnnccttctcttcttcctcttatcctctctctcttctcttctctctctcgtttctctctctgcctcttctcttcctctctcctcctcttctccccctcctctctaccttccctcctcgtccttctcctttctctccctcctctccctcttctctccttctctctcttctctctctctttctctcctcgtttcttctctcttcgttctcttccttcttctcttccctcccctctctcttcgtccctctcctgccccctcctgttttttcctctcccctctcttctctcccctctccccctcccccttcctttttctctctttcttctcttcccccctcctctccctctccctctcctctcgcctcctcctctctttctctcctctctttctcccccccctctctctctccctcctcattcaccacttccctcccccctccctctcctctttgctctctctctctctccctccccctccctccctccccctcgctctcacctcctcctcctccttcgctctctctcctcaccccccaccagccccgctctgcctcgccctccgctcctcctctcttttctattttttttctctcccctgcgcctctttctctccggcttcctctctcttttttttttttttttgtttctgctgtacaccctccttctcacccgcacccggcttctctcttttttcccccccccaatcctctcttccttcctctttctttttctttttaatcctctctctctctcttctttttcctcccccctccctccccccttctctttttttttctcttctccccccctccccccacccatcaaccccccccccccccaccttctttttctctcttttttttctctttcttctttttctgcgccccgcgctctctctcctctttcttctattcctccccccaccccccacacttgtttcgccgcgcccccccctccccctcccccccccccccttttggtttcccccctctttcccccccccctccccccccttttatttttttttttttttcccctctccccccctcctcttttttttttattctccccccgcccccgcttgttttttttcttttttcccccccccagggattcccgaagggttggggaaagcnnnnnnnnnnaaaaaataggaaaaaaaatatttttttgtggagaggggcgttgggttcctctttgttagaaagacaaaaaaaaacccgcccgctcttctccttttaatattacaaaaaaaaaaaaaattttggtggggggggacacaaaaaaaaagaaaaaacctcggcgcgcctcttaaagattttttttttagggggggggggggctttttttttttttttttcccccgggagggggggggtttaaaaaaaaggagaatgttttcac

SEQ ID NO: 2256 - protein, 405 aa, Homo sapiens
  MOD_RES (3)..(6): Variable amino acid
  MOD_RES (384)..(387): Variable amino acid
MGXXXXPSLLPLILSLFSSLSRFSLCLFSSSLLLFSPSSLPSLLVLLLSLPPLPLLSFSLFSLSFSPRFFSLRSLPSSLPSPLSSSLSCPLLFFPLPSLLSPLPLPLPFSLFLLFPPPLPLPLLSPPPLFLSSLSPPPLSLPPHSPLPSPLPLLFALSLSPSPSLPPPRSHLLLLLRSLSSPPTSPALPRPPLLLSFLFFFSPLRLFLSGFLSLFFFFLFLLYTLLLTRTRLLSFFPPPILSSFLFLFLFNPLSLSSFSSPLPPPFSFFFSSPPLPPPINPPPPHLLFLSFFSLSSFSAPRALSPLSSIPPPTPHTCFAAPPPPPPPPPLLVSPLFPPPLPPLLFFFFFPLSPPPLFFLFSPRPRLFFFFFPPPRDSRRVGESXXXXKIGKKIFFCGEGRWVPLC

SEQ ID NO: 2257 - DNA, 1384 bp, Homo sapiens
  source (1)..(1384)
  CDS (201)..(1184)
  modified_base (554)..(563): a, t, c, g, unknown or other
ttttcctcttcttctctcctctcttcttttcttttttttttctctttctccctctttctctcttctttttttttccctcccttctcctccttcccctctcttctccctcctttcctcttccctcttcttccccccctttccctccctccctcttttttttttcttcctttctttctcctcctcctccttttttcctctgcatgtgttctcttcttctccctctttcccctcccctccccccctctttcctttccttctcccccctctcttcccccttcttttctcctctttttctcttttttccctccccttcctctcctcccccttctttcttcccccccttcccctctttcctttccttttctcggcgttgtttttttttttttttccttttctcccctcctttctctttttcctccccttccctccccccccccccttccccccccccccccccaccccccccccccccccccccccctctccttttttttttttttttttttttgccccccggttccccggcatggttcccggggtttttggttagtttnnnnnnnnnnattcttttctctttttcctctcctttttcttctctcttccatccctccatcttctcccttctccttctcttttctttttcttaccttctctctccctctcccccccacctcccccctccccccccccccccccctccttctctctttttttttttttcttttccctttcccctcccctcctttcttttcttttttctctcttctcccctctctctcttccctccttttttctttctttttctctttttttttttttttttttttctcccccgccgtccttcttcttctttcttttctcctccccccccccccccccccccctccccccccccctttttttttttttgtccttccctttctccgtttctttcttttttttctcttccctctctttccttactccttcccccccccccccccttttttttttctttttttttcttttttccaccccaaccccttcccccccccctttttttttttttttccccctctgccccacacccaccttttttttttcccccccccccccccctattttttttctatctcttctcccccccccccccccccccgccccgccgttttttttcaattttttttttttttttttttttttaacccccttttttttctctcttctttttttttgccccccacaccacacaaaaaaaaaaattttttttcttttttttttttttttaaattttttttctcccccccccccccctttttctcccccccttttttcttccccaaataaaattttttttttttttcccccccgcgcacccagaattttttttttcccccgggcaggg

SEQ ID NO: 2258 - protein, 327 aa, Homo sapiens
  MOD_RES (118)..(121): Variable amino acid
MCSLLLPLSPPLPPSFLSFSPLSSPFFSPLFLFFPSPSSPPPSFFPPFPSFLSFSRRCFFFFFLFSPPFSFSSPSLPPPPSPPPPPPPPPPPPPLLFFFFFFLPPGSPAWFPGFLVSXXXXILFSFSSPFSSLFHPSIFSLLLLFSFSYLLSPSPPHLPPPPPPPPPSLFFFFSFPFPLPSFLFFFLSSPLSLFPPFFFLFLFFFFFFFLPRRPSSSFFSPPPPPPPPSPPPFFFFCPSLSPFLSFFSLPSLSLLLPPPPPFFFSFFFFFPPQPLPPPLFFFFSPSAPHPPFFFPPPPPLFFFYLFSPPPPPPPRRFFSIFFFFFFF

SEQ ID NO: 2259 - DNA, 1315 bp, Homo sapiens
  source (1)..(1315)
  CDS (201)..(1115)
  modified_base (1203): a, t, c, g, unknown or other
  modified_base (1209): a, t, c, g, unknown or other
tttcctttaacctaacaggggaagaaattaatttttagattttttatatcattatgcagcttttggggaaaaataattgctgttttggagtcataggatttaccaaaaatctatcagataaatctatcaaatattccatcaaacgaagatttttttttttttgagatcttgctgtgttgcccaggctagagtgcagcagcatggtgatggctcacaacagcagttatgtctctcgcgcgactctcgtctccctccgtttctctctcgtcattcntatttccgtctcctgcccctcatctctctctcgtctcttgtatgttcgtgtccctctcatcctctcgtgtcctctctctcacatgcacgttctgtctcgcgcgtgtgcgtactctctctcattctcccgtctcgcgtctcctctctcattctcgctgttcgtgttcttctttctctctcgtcttcgtgctctctccttcgcgcttctcgcgtctgtactctctctctttttccgtcatgcgtcctctcaccctgtccttctgctctttctgtgctcctcccttcgcgctcctctccgttcacgccctccctgccccacttctcgtctgctactcgcgttcttcctcctctctctccgtttcgttctgtgttcccttcctcccttcgtcctctcgcgcctcttcgcttctcgtctcctcctctcttctctctgccttctcccttcgccgtcgttttattcgcttctcttctcttctccttctttcgcctttttttcttctctcttccccccgctttctcggtcttgtcccgtctccttctttccttcgggctcctctctcctctttttccccttccttctccccgttctcctccgtcctcttctccttactccctcttttctttctcctcctcgttcccctcctcctgtctttcttctttttccctttttttttaattctttctttccccctcttgtgcttttctttcctcccgtctttttcgttgtgtttccccttccttccgccctccttcctcccttggcttgctgttcttctttccctgtccccttctttttcttgttttttctcttggggggggggcgcgcctctctttctctttaaatagcggcccctttttgttgcgcgcgccggggggactattaacgtggtggtgttagcccgcccatctataattcttttccggccggtnggtttnctcgacgataaaccccgaggccattcttggtctacggaaagtgaatattgctgccggtgacaaagcgccggcacgtagcaagctggcgaacttgcccgctacgaat

SEQ ID NO: 2260 - protein, 304 aa, Homo sapiens
  MOD_RES (25): Variable amino acid
MVMAHNSSYVSRATLVSLRFSLVIXISVSCPSSLSRLLYVRVPLILSCPLSHMHVLSRACAYSLSFSRLASPLSFSLFVFFFLSRLRALSFALLASVLSLFFRHASSHPVLLLFLCSSLRAPLRSRPPCPTSRLLLAFFLLSLRFVLCSLPPFVLSRLFASRLLLSSLCLLPSPSFYSLLFSSPSFAFFSSLFPPLSRSCPVSFFPSGSSLLFFPFLLPVLLRPLLLTPSFLSPPRSPPPVFLLFPFFFNSFFPPLVLFFPPVFFVVFPLPSALLPPLACCSSFPVPFFFLFFLLGGGRASLSL

SEQ ID NO: 2261 - DNA, 1564 bp, Homo sapiens
  source (1)..(1564)
  CDS (201)..(1364)
  modified_base (214): a, t, c, g, unknown or other
  modified_base (223): a, t, c, g, unknown or other
  modified_base (251): a, t, c, g, unknown or other
  modified_base (1369): a, t, c, g, unknown or other
  modified_base (1389)..(1400): a, t, c, g, unknown or other
  modified_base (1441): a, t, c, g, unknown or other
  modified_base (1456)..(1457): a, t, c, g, unknown or other
  modified_base (1471)..(1472): a, t, c, g, unknown or other
  modified_base (1476): a, t, c, g, unknown or other
  modified_base (1482)..(1484): a, t, c, g, unknown or other
  modified_base (1487)..(1488): a, t, c, g, unknown or other
  modified_base (1493): a, t, c, g, unknown or other
  modified_base (1497): a, t, c, g, unknown or other
atagaagacatttccagtaactgtgatttcagtgatttcaaagctaaatgaataggagtttcatgcaccatctcataagcattgcatttgcccagaaaactgcttaaacttgacttcagacattgtactacactctgcttctgtaatggatcagttcgctggtatatatgaaattgtaacaggctgtgcataaggctttcatgcctacacattntcacgcggnctccagcggccgccgtaggacgcgcttngttgccccgccgtctcctcgcagtcttcgccgggtgtgtgcgcgattctccgtcgtattctggcggtcgccgtcgcgagttcgctcggctgtggcggcgggtggggcgggtgttcggctgctccggcggtcggggtgtttgtgcggtctgtgtggtagcccggctgttccgtcaatctgtatgttgcgcgcctgtcggcggttctcgtttgtctgcgcgttctccggttgtgtttgggtgggcggcttgtggctttgcccggtgctgcgagtagccggtgttggccgttccgggttcgcgcgtctacgtgttgtggtgatgtcgttttgcggttgtggtatttgcgtttcggtcggtcgcggcgttccgcctggcgtgtgtgcggttcggcgtgggtcgttgcgggttgggcgtgtcgggtcgttggtttcgttgtccggtttttggttctctgcgccgttcttgtttcggttgtcgtgtcgtcttttgcttgccgtgttcgttttcggttcttgttcggtgtgtggtctcgttgtcgcggcggttgtgcggtgcggtgtcgtggtgggttgcggggcgctgctcggtcgggtcggtgtggtttcgcttgatgtcggcgctgggtcctttcgggttcggtttgctttggtttccgttgcgttttctttcgcgtgcgcggtctgtcgggtgccggttggtttgtgttctttggctccctttggttcccattgtttgcgtggcattcctgtgcgtccggttcggtcggttggtcggctgttgcccgttcgggtccgttcggtctgttcagcggttcgttgtttcccggggtgtggtcccgtgtgtggttgtgttccgttgcttccttggtgtggttcatccttttcgtcggggcgtcgctgggttcgtgccggtcgctcggtggtgcgttgggtggttggtgcggtttcgcgttgggttgtcggcccgtgggttgggtggtgcgtggttgcggtgggtgtatgggttgggtggttcggtggtgcgtgtcggtccttggggtggttggaaccggcccaccggtccgatgggtgcggggcgttggcgcgggtttgctggggtggccgcgggaggtgaagggntcacaatgcttcatctggcnnnnnnnnnnnncccctccgccctttttttttttttaacaaaaaaaaaaggcncagccagggacgggnnattgaaaccctgannccantcggannnccnnagaancttncttctacgcgtgcagggacgcgcctggcagcggcccaccctgaggctgcatgacaggaaccggtccc

SEQ ID NO: 2262 - protein, 387 aa, Homo sapiens
  MOD_RES (5): Variable amino acid
  MOD_RES (8): Variable amino acid
  MOD_RES (17): Variable amino acid
MPTHXHAXSSGRRRTRXVAPPSPRSLRRVCARFSVVFWRSPSRVRSAVAAGGAGVRLLRRSGCLCGLCGSPAVPSICMLRACRRFSFVCAFSGCVWVGGLWLCPVLRVAGVGRSGFARLRVVVMSFCGCGICVSVGRGVPPGVCAVRRGSLRVGRVGSLVSLSGFWFSAPFLFRLSCRLLLAVFVFGSCSVCGLVVAAVVRCGVVVGCGALLGRVGVVSLDVGAGSFRVRFALVSVAFSFACAVCRVPVGLCSLAPFGSHCLRGIPVRPVRSVGRLLPVRVRSVCSAVRCFPGCGPVCGCVPLLPWCGSSFSSGRRWVRAGRSVVRWVVGAVSRWVVGPWVGWCVVAVGVWVGWFGGACRSLGWLEPAHRSDGCGALARVCWGGRGR

SEQ ID NO: 2263 - DNA, 1108 bp, Homo sapiens
  source (1)..(1108)
  CDS (201)..(908)
  modified_base (1)..(60): a, t, c, g, unknown or other
  modified_base (69): a, t, c, g, unknown or other
  modified_base (77): a, t, c, g, unknown or other
  modified_base (95): a, t, c, g, unknown or other
  modified_base (100)..(101): a, t, c, g, unknown or other
  modified_base (323): a, t, c, g, unknown or other
  modified_base (927)..(1026): a, t, c, g, unknown or other
  modified_base (1039): a, t, c, g, unknown or other
  modified_base (1042): a, t, c, g, unknown or other
  modified_base (1066): a, t, c, g, unknown or other
nnnnnnnnnnnnnnnnnnnnnnnnnnnnnnnnnnnnnnnnnnnnnnnnnnnnnnnnnnnnaccatagcntgctaggntgccggtgcgactctagnggatnnccttagcaatgggatcatcttcagtgattctaaggcaggtagcccatgttccacactttgagagccttaagttagattcagggaaagctggtcagggggatgttttccatgatggctcccccatcccctaacccctccctcaacagtgactctgtctgtttgtcgcttatgttttgttttctgagccctgctcctgggtttgggcggggggggtgctcctgncctcttgtgctcctccctcctctccctgtgggggggctgggctttcgtgcgcggtcccctcccggcggcctcttggttgtgcctggcgccccgctcttccttcggcctttgccgggtcccgtctgttgtcttttgtttgttcttgtgttttcccccgccggggttgcccctttcgcccgcccctcctcttggttgtccgttttttgcgctttctcccttgttctcccttccgtctccttccgtgtgttttttgtgtggggctctggcgccccgccgtgctgtttcgcgtccgtcgccccgtcccccggcttttctcctcgtttcctcttgtcctttctcgccgcgtctcgtttctccgtctttttcttggtcgggctggcctggctcggtgggggtggtcggtctcgtgctctctggtgggttccttttctcttctttcttgtccgcgtgggggctgcgggtctcgggtgctgtcgttctccgcggtctgtgtgtttgtctgttctttttttctgctgtctgtcgtccggtgctctccccgttctgtccttttccgcttgtctcgttggctttcggaaactgtagaaataaaaaaaaaaaaaannnnnnnnnnnnnnnnnnnnnnnnnnnnnnnnnnnnnnnnnnnnnnnnnnnnnnnnnnnnnnnnnnnnnnnnnnnnnnnnnnnnnnnnnnnnnnnnnnnngaactttagcttngcntaaacctgcggtggcggctctagnagaaaccctctgcccggtcaggtgatgcacttcaaaaagcct

SEQ ID NO: 2264 - protein, 235 aa, Homo sapiens
  MOD_RES (41): Variable amino acid
MFSMMAPPSPNPSLNSDSVCLSLMFCFLSPAPGFGRGGCSXPLVLLPPLPVGGLGFRARSPPGGLLVVPGAPLFLRPLPGPVCCLLFVLVFSPAGVAPFARPSSWLSVFCAFSLVLPSVSFRVFFVWGSGAPPCCFASVAPSPGFSPRFLLSFLAASRFSVFFLVGLAWLGGGGRSRALWWVPFLFFLVRVGAAGLGCCRSPRSVCLSVLFFCCLSSGALPVLSFSACLVGFRKL

SEQ ID NO: 2265 - DNA, 1213 bp, Homo sapiens
  source (1)..(1213)
  CDS (201)..(1013)
  modified_base (8)..(108): a, t, c, g, unknown or other
  modified_base (117): a, t, c, g, unknown or other
  modified_base (134): a, t, c, g, unknown or other
  modified_base (143): a, t, c, g, unknown or other
  modified_base (424): a, t, c, g, unknown or other
  modified_base (435): a, t, c, g, unknown or other
  modified_base (456): a, t, c, g, unknown or other
  modified_base (462): a, t, c, g, unknown or other
  modified_base (483): a, t, c, g, unknown or other
  modified_base (584): a, t, c, g, unknown or other
  modified_base (662): a, t, c, g, unknown or other
  modified_base (689): a, t, c, g, unknown or other
  modified_base (698): a, t, c, g, unknown or other
  modified_base (700): a, t, c, g, unknown or other
  modified_base (716): a, t, c, g, unknown or other
  modified_base (738): a, t, c, g, unknown or other
  modified_base (753): a, t, c, g, unknown or other
  modified_base (859)..(958): a, t, c, g, unknown or other
  modified_base (972): a, t, c, g, unknown or other
  modified_base (986): a, t, c, g, unknown or other
  modified_base (999): a, t, c, g, unknown or other
atatactnnnnnnnnnnnnnnnnnnnnnnnnnnnnnnnnnnnnnnnnnnnnnnnnnnnnnnnnnnnnnnnnnnnnnnnnnnnnnnnnnnnnnnnnnnnnnnnnnnnnnagtacatcnggtacgacggagcatcnggactatgngagcgctccgtctatgtgtctgtgtgtttgtgtgtgtgtctctgtgtgtgtacttgtatgttggggtatgggtatgggtatgtgttgtgtgtatgtgcatgcgcacttgtgtggtacgtgtctgtctgtgtatgtttgtgtgtgtttgtatgtgggtgtatggatatgggttgtgtgtgtgtgtctctgtgtctgtgtgtgagtttatgtgtgtttgtgaggggtacggatatgggtgtgtgtatgcttgtgtgtgtatgtgaatgtggggggggtgtgtngtgtgtgtgtntgtggagggatatgggtgtgnttgttngtgtgtgtggttttttttttngtgggtgtgggtgttgggttgtgtttgttgttgggttgttttctggtttttttttgttgtggggttttgtttttttttttttgttttttgttgggttgggnttggtttttttttttttttttttttggtttgttgggtggggggttggtttttgtgtttttgtgtttggttggttgggngttttggtttttttttgttttgattgntgttttgtngntttttttttttttttntgggtatttgggtgtgggtttngtggtgtgggtggtnttgttgaggtgtggtgtgtttggtgtgggtttgttgtttttgttggtgttggtggggggttgtgggggtttggattttatataaacaaccacccaccccaccaccnnnnnnnnnnnnnnnnnnnnnnnnnnnnnnnnnnnnnnnnnnnnnnnnnnnnnnnnnnnnnnnnnnnnnnnnnnnnnnnnnnnnnnnnnnnnnnnnnnnnggttcctagtttgntagcccctcactcngggtctaaggatnccgatcatatataagtggctatatctgtggttaaaattgttttgccaacagtagcattttcttgttttctccacaaatccaaattctactcattctttcttttgcttcagtcttctttttctcataaagccttccctcctttcaatgcttctgcctactgtgctatattttccttcatgcaatagatccttttctttgagaaagggtctaggta

SEQ ID NO: 2266 - protein, 270 aa, Homo sapiens
  MOD_RES (75): Variable amino acid
  MOD_RES (79): Variable amino acid
  MOD_RES (86): Variable amino acid
  MOD_RES (88): Variable amino acid
  MOD_RES (95): Variable amino acid
  MOD_RES (128): Variable amino acid
  MOD_RES (154): Variable amino acid
  MOD_RES (163): Variable amino acid
  MOD_RES (166)..(167): Variable amino acid
  MOD_RES (172): Variable amino acid
  MOD_RES (180): Variable amino acid
  MOD_RES (185): Variable amino acid
  MOD_RES (220)..(253): Variable amino acid
  MOD_RES (258): Variable amino acid
  MOD_RES (262): Variable amino acid
  MOD_RES (267): Variable amino acid
MLGYGYGYVLCVCACALVWYVSVCVCLCVFVCGCMDMGCVCVSLCLCVSLCVFVRGTDMGVCMLVCVCECGGGVXCVCXWRDMGVXVXVCGFFFXGCGCWVVFVVGLFSGFFLLWGFVFFFLFFVGLXLVFFFFFFWFVGWGVGFCVFVFGWLXVLVFFCFDXCFXXFFFFXWVFGCGFXGVGGXVEVWCVWCGFVVFVGVGGGLWGFGFYINNHPPHHXXXXXXXXXXXXXXXXXXXXXXXXXXXXXXXXXXVPSLXAPHXGSKDXDHI

SEQ ID NO: 2267 - DNA, 1231 bp, Homo sapiens
  source (1)..(1231)
  CDS (201)..(1031)
  modified_base (1)..(9): a, t, c, g, unknown or other
  modified_base (23)..(24): a, t, c, g, unknown or other
  modified_base (32): a, t, c, g, unknown or other
  modified_base (37)..(38): a, t, c, g, unknown or other
  modified_base (40): a, t, c, g, unknown or other
  modified_base (48): a, t, c, g, unknown or other
  modified_base (272): a, t, c, g, unknown or other
  modified_base (276)..(279): a, t, c, g, unknown or other
  modified_base (281): a, t, c, g, unknown or other
  modified_base (283): a, t, c, g, unknown or other
  modified_base (285): a, t, c, g, unknown or other
  modified_base (289): a, t, c, g, unknown or other
  modified_base (291): a, t, c, g, unknown or other
  modified_base (293): a, t, c, g, unknown or other
  modified_base (297)..(299): a, t, c, g, unknown or other
  modified_base (317)..(318): a, t, c, g, unknown or other
  modified_base (326)..(328): a, t, c, g, unknown or other
  modified_base (333)..(334): a, t, c, g, unknown or other
  modified_base (338): a, t, c, g, unknown or other
  modified_base (340)..(341): a, t, c, g, unknown or other
  modified_base (346)..(347): a, t, c, g, unknown or other
  modified_base (349): a, t, c, g, unknown or other
  modified_base (353): a, t, c, g, unknown or other
  modified_base (397): a, t, c, g, unknown or other
  modified_base (533): a, t, c, g, unknown or other
  modified_base (735): a, t, c, g, unknown or other
  modified_base (888): a, t, c, g, unknown or other
  modified_base (912)..(1011): a, t, c, g, unknown or other
  modified_base (1038): a, t, c, g, unknown or other
  modified_base (1044): a, t, c, g, unknown or other
  modified_base (1053): a, t, c, g, unknown or other
nnnnnnnnncctcgacaaggtanngaattttnttcanntncgactatngtgagtgctgccacacacgtacacatacacgtcgcacacacatatgtatatatatctttagaattccagtcatttaaaaagtaagaatccatgtattcaaaaacaatttattcaaaaacaatatggtctaacaatttagatcatattgaataatgtgtgtgtgtgtgtgcgtgtgtgtctctgtgtgtgtgtgtgtgtgtgtgtgtgtgggggggggtgcacgngtgnnnncncncnctcncncncccnnnctggggggggggggggcnntccccccnnnctgcnncctntnnctccnngntttncgggggggtcctcgcgcgggggtcggtggtggggggggtttttnttggggggggggtttgggtgcgtgccgcgccggcggggtgctttttttgttttgtggggggtggggggggtggggtggggggggggggggtttttggggggcttgggttgggtgggcgcgtggtggggtggcgtgnttttgtgtgggcggggttgcggtggggggccggggcgtgtgcgtgtgggtggcctttgcgtggggggtgcggctgtgtttttggggttggggtggggggggggtggtgtggggtgggttgtgcggtggtggggtggtttggggcggcgggtgggggggggtggttggcgtgtggcgcgtctcggtgttttcgttgttttttntgtgggcgggtcgttcgttcgtcggtctctgtcgcgcgcggcggcgcgcggttgttggtggggtggtgtgcggggtcgcgtttgcggcgtgttgttggggttgtgcgggggggcgcgttgtggtgtgggcgggggtgtttgtgtggctgttgngcccctccgtgtggagggcggtcnnnnnnnnnnnnnnnnnnnnnnnnnnnnnnnnnnnnnnnnnnnnnnnnnnnnnnnnnnnnnnnnnnnnnnnnnnnnnnnnnnnnnnnnnnnnnnnnnnnncctccatgcttgatgcttgactttgcnactatngaaggtcgncctcatttacatacttacttttagcctagagaaagcaaccaaagatctgtcactagaatagcttagtgccactcactccaggagtaaaggaaaggtctcttttccaagcctgtgtattcaaaccatgatcaggaattgtttgggaattatgtgaaataaatcttgactctagagttca

SEQ ID NO: 2268 - protein, 276 aa, Homo sapiens
  MOD_RES (24): Variable amino acid
  MOD_RES (26)..(31): Variable amino acid
  MOD_RES (33): Variable amino acid
  MOD_RES (39)..(40): Variable amino acid
  MOD_RES (42)..(43): Variable amino acid
  MOD_RES (45)..(47): Variable amino acid
  MOD_RES (49)..(51): Variable amino acid
  MOD_RES (66): Variable amino acid
  MOD_RES (111): Variable amino acid
  MOD_RES (179): Variable amino acid
  MOD_RES (230): Variable amino acid
  MOD_RES (238)..(271): Variable amino acid
MCVCVCVCVSVCVCVCVCVGGGAXVXXXXXXPXLGGGGXXPXXCXXXLXXXRGGPRAGVGGGGGFXWGGGLGACRAGGVLFLFCGGWGGWGGGGGGFWGAWVGWARGGVAXFCVGGVAVGGRGVCVWVAFAWGVRLCFWGWGGGGVVWGGLCGGGVVWGGGWGGVVGVWRVSVFSLFFXWAGRSFVGLCRARRRAVVGGVVCGVAFAACCWGCAGGRVVVWAGVFVWLLXPSVWRAVXXXXXXXXXXXXXXXXXXXXXXXXXXXXXXXXXXSMLDA

SEQ ID NO: 2269 - DNA, 1387 bp, Homo sapiens
  source (1)..(1387)
  CDS (201)..(1187)
  modified_base (12): a, t, c, g, unknown or other
  modified_base (23)..(24): a, t, c, g, unknown or other
  modified_base (37): a, t, c, g, unknown or other
  modified_base (44): a, t, c, g, unknown or other
  modified_base (319): a, t, c, g, unknown or other
  modified_base (327)..(328): a, t, c, g, unknown or other
  modified_base (345): a, t, c, g, unknown or other
  modified_base (352): a, t, c, g, unknown or other
  modified_base (354): a, t, c, g, unknown or other
  modified_base (458): a, t, c, g, unknown or other
  modified_base (541): a, t, c, g, unknown or other
  modified_base (603): a, t, c, g, unknown or other
  modified_base (634)..(635): a, t, c, g, unknown or other
  modified_base (648): a, t, c, g, unknown or other
  modified_base (650): a, t, c, g, unknown or other
  modified_base (653)..(666): a, t, c, g, unknown or other
  modified_base (668)..(683): a, t, c, g, unknown or other
  modified_base (685): a, t, c, g, unknown or other
  modified_base (687): a, t, c, g, unknown or other
  modified_base (689): a, t, c, g, unknown or other
  modified_base (692)..(693): a, t, c, g, unknown or other
  modified_base (695)..(696): a, t, c, g, unknown or other
  modified_base (709): a, t, c, g, unknown or other
  modified_base (711): a, t, c, g, unknown or other
  modified_base (715): a, t, c, g, unknown or other
  modified_base (734)..(735): a, t, c, g, unknown or other
  modified_base (778)..(780): a, t, c, g, unknown or other
  modified_base (796): a, t, c, g, unknown or other
  modified_base (805): a, t, c, g, unknown or other
  modified_base (863)..(962): a, t, c, g, unknown or other
  modified_base (975): a, t, c, g, unknown or other
  modified_base (993)..(995): a, t, c, g, unknown or other
  modified_base (1000): a, t, c, g, unknown or other
  modified_base (1002): a, t, c, g, unknown or other
  modified_base (1008): a, t, c, g, unknown or other
ttagcttgatgnttcgattttgnnactctgaggtcgnctttganagtgtctgttcatgcctttgcccactttttgagggcttgtttgtttttttcttgtaaatttgtttgagttctttgtagattctggatattagccctttatcagatgagtagattgcaaaaattgtctcccattttgtaggttgcctgttcactctgatggttgtttcttttgctctgcagaagctcctgggggggattagatcccatttgtcaattttggcttttgttgccattgctgggtggtgttttagacctgaagtccttgcccatgcctntgtcctgnntggtcctgcctcggtcntcttgtngngtttctgtgggttttggtttggcggttggggttgggggccctgtggggtggtttttccctttttttttttctctcctcttgggtgggtggggggggtggtttgngttggtctcttgtgggttgtccgcgcgtggcccgggctttttgttggctggtggttgttgtttttgttccgtgttgttgtggngggtggggggtctctcttggtgtttgtgcgctttggtcgtgcttttgttttgtggggcggtnggttgcgtggggctgccctttcgttctgttnnttcccgaaggggngnggnnnnnnnnnnnnnngnnnnnnnnnnnnnnnngngngnggnngnnggggggggggggngngggnggggggggggggggggggnnggggggggggggggggggggggggggggggggggggggggggnnnggggggggggaggggnggggccccnggggcgggggggggggggggggggacggcgcgaccacacaacaaaaacaaaaaaaaannnnnnnnnnnnnnnnnnnnnnnnnnnnnnnnnnnnnnnnnnnnnnnnnnnnnnnnnnnnnnnnnnnnnnnnnnnnnnnnnnnnnnnnnnnnnnnnnnnngttccaattgttngaaatgtttcgattttgnnncaaangnaggtcnccctcttgataacctttctcttgtatcctgaattgtacccagatgctccccgcccctgcacacctcaacctgcctcttctccagtcattttgaactatttgcagctctcacatgtgactgctctttctggctttcaagcttttacatatacatctttccttggatttggttgtttttagtttatgcttttttctattttgctgatcgatagcctgatcaattgtttaattcctccactctattagcttcatagttgcatctatttacattctgatgatctttacattttaggttatattcatattttacactaacaaaataaaagactaatggaaatgtctattttgccccctaacacaaagagctgagaatgcttgta

SEQ ID NO: 2270 - protein, 328 aa, Homo sapiens
  MOD_RES (40): Variable amino acid
  MOD_RES (43): Variable amino acid
  MOD_RES (49): Variable amino acid
  MOD_RES (51)..(52): Variable amino acid
  MOD_RES (86): Variable amino acid
  MOD_RES (114): Variable amino acid
  MOD_RES (135): Variable amino acid
  MOD_RES (145): Variable amino acid
  MOD_RES (150)..(166): Variable amino acid
  MOD_RES (170)..(172): Variable amino acid
  MOD_RES (178)..(179): Variable amino acid
  MOD_RES (193)..(194): Variable amino acid
  MOD_RES (199): Variable amino acid
  MOD_RES (202): Variable amino acid
  MOD_RES (221)..(254): Variable amino acid
  MOD_RES (259): Variable amino acid
  MOD_RES (265): Variable amino acid
  MOD_RES (267)..(268): Variable amino acid
  MOD_RES (270): Variable amino acid
MVVSFALQKLLGGIRSHLSILAFVAIAGWCFRPEVLAHAXVLXGPASVXLXXFCGFWFGGWGWGPCGVVFPFFFFSPLGWVGGVVXVGLLWVVRAWPGLFVGWWLLFLFRVVVXGGGSLLVFVRFGRAFVLWGGXLRGAALSFCXFPKGXXXXXXXXXXXXXXXXXGGGXXXGGGGGXXGGGGGGGGGGGGGXXGGGGXGPXGRGGGGGGRRDHTTKTKKXXXXXXXXXXXXXXXXXXXXXXXXXXXXXXXXXXVPIVXNVSILXQXXVXLLITFLLYPELYPDAPRPCTPQPASSPVILNYLQLSHVTALSGFQAFTYTSFLGFGCF

SEQ ID NO: 2271 - DNA, 1399 bp, Homo sapiens
  source (1)..(1399)
  CDS (201)..(1199)
  modified_base (1)..(94): a, t, c, g, unknown or other
  modified_base (117)..(118): a, t, c, g, unknown or other
  modified_base (127): a, t, c, g, unknown or other
  modified_base (193): a, t, c, g, unknown or other
  modified_base (305)..(312): a, t, c, g, unknown or other
  modified_base (324)..(329): a, t, c, g, unknown or other
  modified_base (347): a, t, c, g, unknown or other
  modified_base (357): a, t, c, g, unknown or other
  modified_base (365): a, t, c, g, unknown or other
  modified_base (367): a, t, c, g, unknown or other
  modified_base (372): a, t, c, g, unknown or other
  modified_base (379): a, t, c, g, unknown or other
  modified_base (381)..(382): a, t, c, g, unknown or other
  modified_base (410): a, t, c, g, unknown or other
  modified_base (571): a, t, c, g, unknown or other
  modified_base (1068)..(1168): a, t, c, g, unknown or other
  modified_base (1182): a, t, c, g, unknown or other
  modified_base (1203): a, t, c, g, unknown or other
  modified_base (1205): a, t, c, g, unknown or other
nnnnnnnnnnnnnnnnnnnnnnnnnnnnnnnnnnnnnnnnnnnnnnnnnnnnnnnnnnnnnnnnnnnnnnnnnnnnnnnnnnnnnnnnnnnnnngcaactacggtgctagatcctgnnctcgctagnaggacacgctcacatcagcatgctgaatgaaattgatctattttccatttatgagaagtaatattnatacataatgatttgttatgaatggataagtactgtatttcccctgggcacattgtcagccaagcattatatactcaatgctgaggttctgctgggtgtggttaggagtctnnnnnnnntttttttttttnnnnnnttgggggggggggggttntttttttttntttttgtntnttgtnttttttntnntttttttttttttccctttcttgtttgntctttcgcgcctggccggctgtgtgctttttcgtgcggggttccggcctgccctcggtccctggggtgcgtcggctttgcggcgtgcggggtttgccttttttttcgcggcgcgctctttccctccgtttggggggcgggccctgtgggcggctctggggntcccgtgctttggggggcttgtcttgtgtttcgggggttctccccggtgtcccttctgtgttctgtggcttcgtctgtttgggggggtttctccggggtgcttcgttgtccttgggggggcgcggcggttggccccgtgttttgcctgtcccgcctttccgggctggccggcgccgctggccgtggtggcgccgggcgtgtcgggcgtgggcgccggtggggggccgcccggcctgcgtttttttgggtttgcgtgggcgttgccgtgcgttttcgctttttttgcgcgcttgggggtttgcctcttttggcttttgtctgggcgttcttttgccgccttgtgcgccttcttttttctccgcggccgcttggcgcccgcgctcttttgtttctgcgccggccggcttttcttgcggtagccgcggcggttctgcgggcgggtccgggcgcgtttgccggcgcgcgctttgccggcgtttgggaacggtgtcgggccnnnnnnnnnnnnnnnnnnnnnnnnnnnnnnnnnnnnnnnnnnnnnnnnnnnnnnnnnnnnnnnnnnnnnnnnnnnnnnnnnnnnnnnnnnnnnnnnnnnnngcaactaggttgcntagccctgctccactagggtngnaggatcaaactttttcacaaaaaaaaaaaaaaaacaccagagtctcgctttgtcgcccagggtggagtgcgtggcacaatcttggctcactgcaagctccgccttctgggttcacaccattctcctaccttaaccttcggagtagctgggactacaggcgcccgccaccacgcccagttaattttttctatttt

SEQ ID NO: 2272 - protein, 332 aa, Homo sapiens
  MOD_RES (35)..(38): Variable amino acid
  MOD_RES (42)..(43): Variable amino acid
  MOD_RES (49): Variable amino acid
  MOD_RES (53): Variable amino acid
  MOD_RES (55)..(56): Variable amino acid
  MOD_RES (58): Variable amino acid
  MOD_RES (60)..(61): Variable amino acid
  MOD_RES (70): Variable amino acid
  MOD_RES (124): Variable amino acid
  MOD_RES (290)..(323): Variable amino acid
  MOD_RES (328): Variable amino acid
MICYEWISTVFPLGTLSAKHYILNAEVLLGVVRSXXXXFFFXXLGGGGXFFFXFXXCXFXXFFFFPFLVXSFAPGRLCAFSCGVPACPRSLGCVGFAACGVCLFFRGALFPSVWGAGPVGGSGXPVLWGACLVFRGFSPVSLLCSVASSVWGGFSGVLRCPWGGAAVGPVFCLSRLSGLAGAAGRGGAGRVGRGRRWGAARPAFFWVCVGVAVRFRFFCALGGLPLLAFVWAFFCRLVRLLFSPRPLGARALLFLRRPAFLAVAAAVLRAGPGAFAGARFAGVWERCRAXXXXXXXXXXXXXXXXXXXXXXXXXXXXXXXXXXQLGCXALLH

SEQ ID NO: 2273 - DNA, 1120 bp, Homo sapiens
  source (1)..(1120)
  CDS (201)..(920)
  modified_base (30)..(129): a, t, c, g, unknown or other
  modified_base (135): a, t, c, g, unknown or other
  modified_base (906): a, t, c, g, unknown or other
  modified_base (909): a, t, c, g, unknown or other
  modified_base (947)..(1046): a, t, c, g, unknown or other
  modified_base (1055): a, t, c, g, unknown or other
  modified_base (1082): a, t, c, g, unknown or other
  modified_base (1089): a, t, c, g, unknown or other
  modified_base (1106): a, t, c, g, unknown or other
aagtnactgcgattcatgcaaaagtgtgcnnnnnnnnnnnnnnnnnnnnnnnnnnnnnnnnnnnnnnnnnnnnnnnnnnnnnnnnnnnnnnnnnnnnnnnnnnnnnnnnnnnnnnnnnnnnnnnnnnnngccttntcctctcctgcagaagacattgcgacagtgaacacgcacacattgcgtcatgtgaacacgcacacatgtgcgtacatgtgtatacacgcacacatgtgcgtacatgtgtatacacgcacacatgtgcgtacatgtgtatacacgcacacatgtgcgtacatgtgtatacacgcacacatgtgcgtacatgtgtatacacgcacacatgtgcgtacatgtgtatacacgcacacatgtgcgtacatgtgtatacacgcacacatgtgcgtacatgtgtatacacgcacacatgtgcgtacatgtgtatacacgcacacatgtgcgtacatgtgtatacacgcacacatgtgcgtacatgtgtatacacgcacacatgtgcgtacatgtgtatacacgcacacatgtgcgtacatgtgtatacatgtgtatatgtatacaagtgtatatacaagtgtatatgtatacaagtgtgtatgtatacgtgtgtgtatgtatacgtgtgtgtatgtatacgtgtgtctacatgcatacgtgtgtgtatacgtgtgtctacatgtatacacgtgtgtgtatacgtgtgtctgtatgtatacatatatatagagtatactctgttgcccagagtatatatacatatatgtatacatatatatacgtatgtatacatatacacgtatgtatacgtatatatggatccatatatacacgtatgtatacgtatatacgtatgtatacatatatacacgcatgtgtacatatatagggtttttnctnctacaaagtgactgcgagttcatgcaaaaagttgtgcnnnnnnnnnnnnnnnnnnnnnnnnnnnnnnnnnnnnnnnnnnnnnnnnnnnnnnnnnnnnnnnnnnnnnnnnnnnnnnnnnnnnnnnnnnnnnnnnnnnngcctcaccnaatacttattcaccaaatgaattacanagcctcntcattcataacattagnagatcccagtgtca

SEQ ID NO: 2274 - protein, 239 aa, Homo sapiens
  MOD_RES (236)..(237): Variable amino acid
MCVHVYTRTHVRTCVYTHTCAYMCIHAHMCVHVYTRTHVRTCVYTHTCAYMCIHAHMCVHVYTRTHVRTCVYTHTCAYMCIHAHMCVHVYTRTHVRTCVYTHTCAYMCIHAHMCVHVYTCVYVYKCIYKCICIQVCMYTCVYVYVCVCIRVSTCIRVCIRVSTCIHVCVYVCLYVYIYIEYTLLPRVYIHICIHIYTYVYIYTYVYVYMDPYIHVCIRIYVCIHIYTHVYIYRVFXXTK

SEQ ID NO: 2275 - DNA, 1231 bp, Homo sapiens
  source (1)..(1231)
  CDS (201)..(1031)
  modified_base (1)..(94): a, t, c, g, unknown or other
  modified_base (129): a, t, c, g, unknown or other
  modified_base (914)..(1013): a, t, c, g, unknown or other
  modified_base (1052): a, t, c, g, unknown or other
  modified_base (1055): a, t, c, g, unknown or other
nnnnnnnnnnnnnnnnnnnnnnnnnnnnnnnnnnnnnnnnnnnnnnnnnnnnnnnnnnnnnnnnnnnnnnnnnnnnnnnnnnnnnnnnnnnnnngcacatcttttgctgaaccgcagcttccctcgtanaggacaactccgtacatgtgtatacacgcacacatgtgcgtacatgtgtatacacgcacacatgtgcgtacatgtgtatacacgcacacatgtgcgtacatgtgtatacacgcacacatgtgcgtacatgtgtatacacgcacacatgtgcgtacatgtgtatacacgcacacatgtgcgtacatgtgtatacacgcacacatgtgcgtacatgtgtatacacgcacacatgtgcgtacatgtgtatacacgcacacatgtgcgtacatgtgtatacacgcacacatgtgcgtacatgtgtatacacgcacacatgtgcgtacatgtgtatacacgcacacatgtgcgtacatgtgtatacatgtgtatatgtatacaagtgtatatacaagtgtatatgtatacaagtgtgtatgtatacgtgtgtgtatgtatacgtgtgtgtatgtatacgtgtgtctacatgcatacgtgtgtgtatacgtgtgtctacatgtatacacgtgtgtgtatacgtgtgtctgtatgtatacatatatatagagtatactctgttgcccagagtatatatacatatatgtatacatatatatacgtatgtatacatatacacgtatgtatacgtatatatggatccaatatacacgtatgtatacgtatatacgtatgtatacatatatacacgcatgtgtcatatatacgtatgtatacatatatacatgcatgtatacgtatatacgtatgatacatatatacacgtatgtaacgtatatagggtgatatcnnnnnnnnnnnnnnnnnnnnnnnnnnnnnnnnnnnnnnnnnnnnnnnnnnnnnnnnnnnnnnnnnnnnnnnnnnnnnnnnnnnnnnnnnnnnnnnnnnnngcacatacttttgcatgaaacccacgcctactttctagnagnatccccaccactcttaacgagcatgctgccttcaagcatctgtttaacaaagcacatcttgcaccacccttaatccatttaaccctgagtggacacagcacatgtttcagagagcacagggttgggggtagggtcaccgatcaacaggatcacaaggcagaagaatttttcttagt

SEQ ID NO: 2276 - protein, 276 aa, Homo sapiens
  MOD_RES (238)..(271): Variable amino acid
MCIHAHMCVHVYTRTHVRTCVYTHTCAYMCIHAHMCVHVYTRTHVRTCVYTHTCAYMCIHAHMCVHVYTRTHVRTCVYTHTCAYMCIHAHMCVHVYTCVYVYKCIYKCICIQVCMYTCVYVYVCVCIRVSTCIRVCIRVSTCIHVCVYVCLYVYIYIEYTLLPRVYIHICIHIYTYVYIYTYVYVYMDPIYTYVYVYTYVYIYTRMCHIYVCIHIYMHVYVYTYDTYIHVCNVYRVIXXXXXXXXXXXXXXXXXXXXXXXXXXXXXXXXXXAHTFA

SEQ ID NO: 2277 - DNA, 1372 bp, Homo sapiens
  source (1)..(1372)
  CDS (201)..(1172)
  modified_base (239): a, t, c, g, unknown or other
  modified_base (274)..(373): a, t, c, g, unknown or other
  modified_base (494): a, t, c, g, unknown or other
  modified_base (549): a, t, c, g, unknown or other
  modified_base (576): a, t, c, g, unknown or other
  modified_base (1157): a, t, c, g, unknown or other
  modified_base (1160)..(1161): a, t, c, g, unknown or other
  modified_base (1204)..(1303): a, t, c, g, unknown or other
  modified_base (1315): a, t, c, g, unknown or other
  modified_base (1320): a, t, c, g, unknown or other
  modified_base (1346): a, t, c, g, unknown or other
aaaaaatatttaaggctaaacaatattctgttacaattttttcctcaatgttaggcaaattaaatatcttcatccccactaaccacataggttaaaatcggaatgcatttcaaactatttaaatttctcctactcttaccctaccactcatgaaccctactattttgagttctgaggcaagttcagactgattcaaattcatgtgtcccatggctagtcagagcctggggtgggatctnctacaggtaagctcagtttcagcaaaaagttggcnnnnnnnnnnnnnnnnnnnnnnnnnnnnnnnnnnnnnnnnnnnnnnnnnnnnnnnnnnnnnnnnnnnnnnnnnnnnnnnnnnnnnnnnnnnnnnnnnnnntttaatagctctcaccttgcccagagtatatagtacatgtgcgtacatgttatcacgcacacattgcgtacatgttatacacgcacacatgtgcgtacatgtgtatcacgcacacatgtgntacatgtgtatacacgcacacatgtgcgtacatgtgtatacacgcacacatgtgntacatgtgtatacacgcacacatgtgntacatgtgtatcacgcacacatgtgcgtacatgtgtatacacgcacacatgtgcgtacatgtgtatacacgcacacatgtgcgtacatgtgtatacacgcacacatgtgcgtacatgtgtatacacgcacacatgtgcgtacatgtgtatacatgtgtatatgtatacaagtgtatatacaagtgtatatgtatacaagtgtgtatgtatacgtgtgtgtatgtatacgtgtgtgtatgtatacgtgtgtctacatgcatacgtgtgtgtatacgtgtgtctacatgtatacacgtgtgtgtatacgtgtgtctgtatgtatacatatatatagagtatactctgttgcccagagtatatatacatatatgtatacatatatatacgtatgtatacatatacacgtatgtatacgtatatatggatccatatatacacgtatgtatacgtatatacgtatgtatacatatatacacgcatgtgtacatatatacgtatgtatacatatatacatgcatgtatacgtatatacgtatgtatacatatatacacgtatgtatacgtatatagtgtgtttgatnctnntacaaaagtaggcctggggtttcatgcacacgagtatgtgctnnnnnnnnnnnnnnnnnnnnnnnnnnnnnnnnnnnnnnnnnnnnnnnnnnnnnnnnnnnnnnnnnnnnnnnnnnnnnnnnnnnnnnnnnnnnnnnnnnnnattgcagctttnttctntgacagagggttcaagtcagcatagntgcatttggttttaacacaagtgcca

SEQ ID NO: 2278 - protein, 323 aa, Homo sapiens
  MOD_RES (13): Variable amino acid
  MOD_RES (25)..(58): Variable amino acid
  MOD_RES (98): Variable amino acid
  MOD_RES (117): Variable amino acid
  MOD_RES (126): Variable amino acid
  MOD_RES (319)..(321): Variable amino acid
MCPMASQSLGWDXLQVSSVSAKSWXXXXXXXXXXXXXXXXXXXXXXXXXXXXXXXXXXLIALTLPRVYSTCAYMLSRTHCVHVIHAHMCVHVYHAHMXYMCIHAHMCVHVYTRTHVXHVYTRTHVXHVYHAHMCVHVYTRTHVRTCVYTHTCAYMCIHAHMCVHVYTRTHVRTCVYMCICIQVYIQVYMYTSVYVYVCVCIRVCMYTCVYMHTCVYTCVYMYTRVCIRVSVCIHIYRVYSVAQSIYTYMYTYIYVCIHIHVCIRIYGSIYTRMYTYIRMYTYIHACVHIYVCIHIYMHVYVYTYVYIYTRMYTYIVCLXXXQK

SEQ ID NO: 2279 - DNA, 1411 bp, Homo sapiens
  source (1)..(1411)
  CDS (201)..(1211)
  modified_base (722): a, t, c, g, unknown or other
  modified_base (1068)..(1069): a, t, c, g, unknown or other
  modified_base (1077)..(1176): a, t, c, g, unknown or other
gtgttcgttgttgtgcgcggtttggcgtgttttgcgctgtgtgtgtgcgttttcgagcttttgtggctgtggcgctgtttcggtctcttgtggcttgtttgctttttggggcgttgtcgagtctgttcttgttgggtgtttttgtgcggttgccgcgtgtttcctttgtcgtgtgttcgccgttgcgtcgtttggcgattatggcttgtttgtgttttgactttttgcgctgttggccgttccgcgtttgtagtgtgcggttgtttgtgttcgcgtttgtcgttttcgcgtgtgggccttttcgtttttgtgtttgcgtggttccgtgtttgggtgtcgcgttttgcgtgtttgctgtttctttggtctgttgcggtgtttgtttccgggtgtcggctgggtttttgggttggttcgttgtggcttgtggctggtgtgtgtgggtggtgtgttgcggttggtgtttcgttttgtggtttgtgttgcttgtcgttttcttgttcgtttgtgttgcggcgttttcttggttgtggggtttgggttttgtgtgtcggttggttgtgtgtggtttgtgttgtggtttgtttgttcgctttgggtttggttggccttttcgccttggttgttttttgttgttcggttttttttggtgtgtcttgttgccgtggttttgctttggtttggttgtttggtgttggttgtgtttgttgctttcttttttntttttggtcgcttgtgtgtgttgcttgcgtttgtttttttcgttgcttttttatgtcgcttttcttgttttggtttgctgtgtttgttttggtctcttgctttttttcgttggttttggttttttttcttccgtgggttccttgtgttgggttttttggttgggtttcgttcttggtctgtgttttggttgtgttgtggttcgttcgtcggttgggggggggggcctttgcttttttttgtttcccccccctttttgtttttgtgcgtgggttgtcgtaacaatttgggggtgttttggctgtggtggttttcttttaatcccccggtgtgtttttctctctattnntcgccagnnnnnnnnnnnnnnnnnnnnnnnnnnnnnnnnnnnnnnnnnnnnnnnnnnnnnnnnnnnnnnnnnnnnnnnnnnnnnnnnnnnnnnnnnnnnnnnnnnnngacagttgtattggagcttcgtccactgggtgtgagagcgccgcatcctctgaagcatcaagtagtgccgtcgttgtattcattcataaggtgcagcagtcccaggcggaggtcgtctgctaagcaacgtgatgagtgggccaatatacataaatcttagagtccatccgtggggttcataaatggcccatggagacgagaagtgagggaagcctaagcaaacagagatttggtt

SEQ ID NO: 2280 - protein, 336 aa, Homo sapiens
  MOD_RES (174): Variable amino acid
  MOD_RES (290): Variable amino acid
  MOD_RES (293)..(326): Variable amino acid
MACLCFDFLRCWPFRVCSVRLFVFAFVVFACGPFRFCVCVVPCLGVAFCVFAVSLVCCGVCFRVSAGFLGWFVVACGWCVWVVCCGWCFVLWFVLLVVFLFVCVAAFSWLWGLGFVCRLVVCGLCCGLFVRFGFGWPFRLGCFLLFGFFWCVLLPWFCFGLVVWCWLCLLLSFXFLVACVCCLRLFFSLLFYVAFLVLVCCVCFGLLLFFVGFGFFSSVGSLCWVFWLGFVLGLCFGCVVVRSSVGGGGLCFFLFPPPFCFCAWVVVTIWGCFGCGGFLLIPRCVFLSIXRQXXXXXXXXXXXXXXXXXXXXXXXXXXXXXXXXXXQLYWSFVHWV

SEQ ID NO: 2281 - DNA, 1567 bp, Homo sapiens
  source (1)..(1567)
  CDS (201)..(1367)
  modified_base (208)..(307): a, t, c, g, unknown or other
  modified_base (581): a, t, c, g, unknown or other
  modified_base (1167): a, t, c, g, unknown or other
  modified_base (1186)..(1187): a, t, c, g, unknown or other
  modified_base (1220): a, t, c, g, unknown or other
  modified_base (1241): a, t, c, g, unknown or other
  modified_base (1259)..(1358): a, t, c, g, unknown or other
ctgaactcgcctaccccactaacatagtggctgcccctttggctgaagaggaacatgtgtcctcggccacttcaatcactgagtgtgacaaactttcttcctttgccacaacagtggctgagggcccatctgtggcctcacttacagctccccagacagaggagacaggcaagggggatactctagaggcgggaaccggcatgcaacnnnnnnnnnnnnnnnnnnnnnnnnnnnnnnnnnnnnnnnnnnnnnnnnnnnnnnnnnnnnnnnnnnnnnnnnnnnnnnnnnnnnnnnnnnnnnnnnnnnncgtttttctctgcgtgtctccgcggctttgtcactccgtttgtgggggttctccgaggcggttgtgttccttgggggggtgcccccctttgggggggtgttggttttccgcccctcgggttggtttaggggggtgtattgcccgctttcctgctcgcctttctgtgttttctgcgttgtccgcttctctttctgtgcggtgttctttggcgtttggtgcctttttttgtgtttttgcccctctgctctgccgcttgcgcgttcttttttcgttntgccctctttccgttcgggttttcgcgcgggttttttcctgtgtccccgctctttttccccgctccgggccagtggctctgtctttgctgtccttcgtggttcttcttctcgcggggttccctctcctcttctctgttttgccgggggttcctgggcgctttttctttcttccctggtttgtctttctcgccccgttggtttcttgggtctttccggttccttttttcctggcctttggcccccctctggtgtgggttggctggtttttcccgccttggccgggctcttgtcgtctttcttttcgccgttttctttccggggtttccgttgggtttttcttcgtggcctttttcttcctgtttccgttctccttttgccgctttgcctctctccggtggcttgttggtcccccttgctttcttgtggtggtgtttgtgtgtctccctggtggcttggtcccccgggtcttctcgggtctttttcctctccggggctggtctgccttgcttttctctcctgtttggtgggggggccgcgtcctctttccctctgctctcccctctgtgctttcgcctgtgcgcgtgncaactaaatttcctgtccnngccgcttcccttctccttcccctctatcgcggntggtgctgttgtccctatagnggccgagctctagtccannnnnnnnnnnnnnnnnnnnnnnnnnnnnnnnnnnnnnnnnnnnnnnnnnnnnnnnnnnnnnnnnnnnnnnnnnnnnnnnnnnnnnnnnnnnnnnnnnnngcttggtgaggcccgtgtttttttttcctgcgggatccgctcgtgttccaccgtttgggtcgcggggttttggggtgtcccgcgtcctttagtgcctcttttgtctttgcgttttgccgtttattttgtcccgcaggggcccgggcgagctcccttttgttctcgggtgggcggtgggcgcttcctctcccgggggttttggggggttg

SEQ ID NO: 2282 - protein, 388 aa, Homo sapiens
  MOD_RES (3)..(36): Variable amino acid
  MOD_RES (127): Variable amino acid
  MOD_RES (323): Variable amino acid
  MOD_RES (329): Variable amino acid
  MOD_RES (340): Variable amino acid
  MOD_RES (347): Variable amino acid
  MOD_RES (353)..(386): Variable amino acid
MQXXXXXXXXXXXXXXXXXXXXXXXXXXXXXXXXXXVFLCVSPRLCHSVCGGSPRRLCSLGGCPPLGGCWFSAPRVGLGGCIARFPARLSVFSALSASLSVRCSLAFGAFFCVFAPLLCRLRVLFSXCPLSVRVFARVFSCVPALFPRSGPVALSLLSFVVLLLAGFPLLFSVLPGVPGRFFFLPWFVFLAPLVSWVFPVPFFLAFGPPLVWVGWFFPPWPGSCRLSFRRFLSGVSVGFFFVAFFFLFPFSFCRFASLRWLVGPPCFLVVVFVCLPGGLVPRVFSGLFPLRGWSALLFSPVWWGGRVLFPSALPSVLSPVRVXTKFPVXAASLLLPLYRXWCCCPYXGRALVXXXXXXXXXXXXXXXXXXXXXXXXXXXXXXXXXXAW

SEQ ID NO: 2283 - DNA, 1360 bp, Homo sapiens
  source (1)..(1360)
  CDS (201)..(1160)
  modified_base (49)..(148): a, t, c, g, unknown or other
  modified_base (1162): a, t, c, g, unknown or other
  modified_base (1215): a, t, c, g, unknown or other
  modified_base (1235)..(1334): a, t, c, g, unknown or other
acgataaaggacaagaatggtagctgagagagagagagagcgacagacnnnnnnnnnnnnnnnnnnnnnnnnnnnnnnnnnnnnnnnnnnnnnnnnnnnnnnnnnnnnnnnnnnnnnnnnnnnnnnnnnnnnnnnnnnnnnnnnnnnncgtcctgtctgcctctccctcctcgtgtcttgccgcgatcgtgccttcgtggatgggtgtcgcggtttctccgctgtctctctctctctcccgtctctctcgccggtctgctcgtcgtacccttccctctctcccttttctcgtctctcgtgtcccttgttttgtttttctctcgcgtgcttgttctcgtctctgcggcttttcttcttttcctcctctccgttctctttctctgtttttctggacttccttctctcttgtccttcttctctccttccttattcccctttgtccttggtcgcctctcctctttcggcgttcttctatttcgtttccctctgtcgtcttcctgtcttttctcccgttgttctttcccttctctcccgctccttctgtctttcgttcctttctcctcttgctgtccgccttctttaatcctgttccccctctctctcccctgtttttctgtgctcttttcctcttccctgtgtcgtgtttctttctcgttcttcttctcttttctccgctcttcttggtctttctttcctctgcgcctcctcttgtcctctgttgttctcctctccccttctcttctcttcccctcccttctcctctgttccgccgtttttgccgcctctttctcttctgtttcctctttttctcctctttcccttcccttctccccttgcttttcccgcgccttttctccttcctgtctttcttttctcttccgctcttccttctcgtcccgcccttgttttctcctctctcgtccccgctctcctgctctgtctcttccctctctcttcctcttctctcccttcgcctccttcgctccttgtcttctctcggtcgtttctcttccaccctgttctgtcgctcttttcttctctgcctctcctctgtgcacgcttctttctctctccttgtttgtggcttcttcggggggggctctctcctcttttttaaaaatccccccctcgtttttcgttctgtgctgcgggtggtttaatntattccggtgggtctatacccgtgccgtggagaaagttttttttctgcccggntagattttgctgacccattnnnnnnnnnnnnnnnnnnnnnnnnnnnnnnnnnnnnnnnnnnnnnnnnnnnnnnnnnnnnnnnnnnnnnnnnnnnnnnnnnnnnnnnnnnnnnnnnnnnnggctcttggagacaggcatagacttc

SEQ ID NO: 2284 - protein, 319 aa, Homo sapiens
MGVAVSPLSLSLSRLSRRSARRTLPSLPFLVSRVPCFVFLSRACSRLCGFSSFPPLRSLSLFFWTSFSLVLLLSFLIPLCPWSPLLFRRSSISFPSVVFLSFLPLFFPFSPAPSVFRSFLLLLSAFFNPVPPLSPLFFCALFLFPVSCFFLVLLLFSPLFLVFLSSAPPLVLCCSPLPFSSLPLPSPLFRRFCRLFLFCFLFFSSFPSLLPLLFPRLFSFLSFFSLPLFLLVPPLFSPLSSPLSCSVSSLSLPLLSLRLLRSLSSLGRFSSTLFCRSFLLCLSSVHASFSLLVCGFFGGGSLLFFKNPPLVFRSVLRVV

SEQ ID NO: 2285 - DNA, 1240 bp, Homo sapiens
  source (1)..(1240)
  CDS (201)..(1040)
  modified_base (248)..(347): a, t, c, g, unknown or other
  modified_base (1088): a, t, c, g, unknown or other
  modified_base (1125): a, t, c, g, unknown or other
  modified_base (1172): a, t, c, g, unknown or other
  modified_base (1174)..(1175): a, t, c, g, unknown or other
  modified_base (1219): a, t, c, g, unknown or other
  modified_base (1222): a, t, c, g, unknown or other
  modified_base (1234)..(1235): a, t, c, g, unknown or other
gttcagggagcttccaggtaggtggacacatgtgagtgtcagagagggtgtgcaagctctgggcccctttccacatgtcttgctctgtgtgtctcttctgtctggctgttatcctttaaatgagaaaccagtaaatataagtacagtgtttctctgagatctgtgaacctctctagcaaattaaacttaaggagggagtcatgagaaggactgatttaactaaatcgatcgggagtcgtgccaatctnnnnnnnnnnnnnnnnnnnnnnnnnnnnnnnnnnnnnnnnnnnnnnnnnnnnnnnnnnnnnnnnnnnnnnnnnnnnnnnnnnnnnnnnnnnnnnnnnnnnaggggggttttctccttcccccggtcttttttgggttttggggccctttttcctcttttctccgacccggggggtgctctttcccccctcctggcggtgtgttttttgcttgctgcgtttggccttcccttgggtttttcgattcgccctccccttggtggtatttggggcttcctgggtttgggttggtggggtagcctgtgtgtttttgccttggggttccctgtgggccctttcttttcccctttgccgcccgttgcgctttggggtttctctccgcgcccctttgcccttgtttttccctggggttggggtgcgagggttcccctccctaccttgcccgtttcccgggttgttttggcggtttgtattgcggtctcgcgttggtattttaactttgtgctttttgcctgttcccttggttggcggggttttgttggaattcccctgttttccgctgttgtccgggggtgccagcctttgtgtcctctttttcacctgacatgggtcccctgggttcacttgccttttgactcggcctcgacctcggggcaggttttttctttggtccttgtagggctcgccttggaattttgtttgcttgcccttctgccattcccctactctgtcttgtgtggcccctcccggaccctcttcccttttgtgctggtgtgctctacacacaccctttgagagtctggtcttgtttttgttcccttttcaggtccctcctcttttgtntgtgtgtatatctgtctgtctctctctcccgttcctnggttctctctcccctcctggtgctccttggtctcctcctcctcttantnntttttttttgtggtcgccctttcgctccttttggtttttttgcntgnctttcttccttnnggttt

SEQ ID NO: 2286 - protein, 279 aa, Homo sapiens
  MOD_RES (16)..(49): Variable amino acid
MRRTDLTKSIGSRANXXXXXXXXXXXXXXXXXXXXXXXXXXXXXXXXXXRGVFSFPRSFLGFGALFPLFSDPGGALSPLLAVCFLLAAFGLPLGFSIRPPLGGIWGFLGLGWWGSLCVFALGFPVGPFFSPLPPVALWGFSPRPFALVFPWGWGARVPLPTLPVSRVVLAVCIAVSRWYFNFVLFACSLGWRGFVGIPLFSAVVRGCQPLCPLFHLTWVPWVHLPFDSASTSGQVFSLVLVGLALEFCLLALLPFPYSVLCGPSRTLFPFVLVCSTHTL

SEQ ID NO: 2287 - DNA, 1315 bp, Homo sapiens
  source (1)..(1315)
  CDS (201)..(1115)
  modified_base (417): a, t, c, g, unknown or other
  modified_base (437): a, t, c, g, unknown or other
  modified_base (440)..(444): a, t, c, g, unknown or other
  modified_base (446): a, t, c, g, unknown or other
  modified_base (448)..(449): a, t, c, g, unknown or other
  modified_base (455): a, t, c, g, unknown or other
  modified_base (466)..(467): a, t, c, g, unknown or other
  modified_base (469)..(470): a, t, c, g, unknown or other
  modified_base (472): a, t, c, g, unknown or other
  modified_base (487): a, t, c, g, unknown or other
  modified_base (489)..(491): a, t, c, g, unknown or other
  modified_base (501)..(502): a, t, c, g, unknown or other
  modified_base (519): a, t, c, g, unknown or other
  modified_base (553): a, t, c, g, unknown or other
  modified_base (557): a, t, c, g, unknown or other
  modified_base (561): a, t, c, g, unknown or other
  modified_base (567): a, t, c, g, unknown or other
  modified_base (686): a, t, c, g, unknown or other
  modified_base (732): a, t, c, g, unknown or other
  modified_base (782): a, t, c, g, unknown or other
  modified_base (830)..(831): a, t, c, g, unknown or other
  modified_base (856): a, t, c, g, unknown or other
  modified_base (967)..(1066): a, t, c, g, unknown or other
  modified_base (1129): a, t, c, g, unknown or other
tcaagaggatcccttacaccttttaatccctttccaaactgtattttttggaaggaagtcactgcgcacactcacatttaaaaagctgagagttataattcatttaagggggtgtccttagataatctgctaggaattcagcacagatttttctcttttccccagtttctttaataatttgataatttatttatgtcgatatgtgctcactgatatttcttttatactttgaattttcatcagtactaatttatttattttgttactcaaattaccacagctttggccatcagaggccctttcagttggcttctgtgtacattaatctatccaccctgccaattttctgtgtgtgctttcttcacctccttcctcctcctcctcctccgcctcttcttcttgtactacagcggggtnttttcttgtaccagggacgnagnnnnngngnnttgggnggtttttgggnngnngntttttgtttttttgngnnntcggggtggnntctgggggttgggtggntttgtgggttttgggccgtttgggggtgtttggngtgntttnggttgngggtggtttttttccccccccggggctgggtttttttttttgggggcccgcggcgggggccttgggtcttgcggttttttccgcggccccgttgttctgggccccccgggcttgttccngggttgtgtttgggtgggggggggtttttttgggtcttttctgggntttggggggccctgggggcctcctgcccccccgggggctttcttccgggncttctttggtttcttttgcctttggctgggcccgttcttgttctttgnngttctctggggggggggcggggggntttttttttccctcttttcccccttttcccttttgggggccccccccccgcgtttcggggctccccctggttttctttttttctttgggcctgtttcccggggggcctcgnnnnnnnnnnnnnnnnnnnnnnnnnnnnnnnnnnnnnnnnnnnnnnnnnnnnnnnnnnnnnnnnnnnnnnnnnnnnnnnnnnnnnnnnnnnnnnnnnnnncagcaatcatgcctgcaggtcgactctagaggatcccccacacctgtaatcccagcacttttnggaggccaaggcaagtggatcatctgaggtcaggaggtcgagaccagcctggccaacatggtgaaaccccgtctctagaaaaatacaaaaaattagctgggcatggtggcaggtgcctgtagccccagctacttgggtggctgaggcaggagaatcgcttgaacctggcaggtggaggttgcagtg

SEQ ID NO: 2288 - protein, 304 aa, Homo sapiens
  MOD_RES (73): Variable amino acid
  MOD_RES (79)..(83): Variable amino acid
  MOD_RES (85): Variable amino acid
  MOD_RES (89)..(91): Variable amino acid
  MOD_RES (96)..(97): Variable amino acid
  MOD_RES (101): Variable amino acid
  MOD_RES (107): Variable amino acid
  MOD_RES (118)..(119): Variable amino acid
  MOD_RES (121): Variable amino acid
  MOD_RES (123): Variable amino acid
  MOD_RES (162): Variable amino acid
  MOD_RES (178): Variable amino acid
  MOD_RES (194): Variable amino acid
  MOD_RES (210)..(211): Variable amino acid
  MOD_RES (219): Variable amino acid
  MOD_RES (256)..(289): Variable amino acid
MCSLIFLLYFEFSSVLIYLFCYSNYHSFGHQRPFQLASVYINLSTLPIFCVCFLHLLPPPPPPPLLLVLQRGXFLYQGXXXXXLXGFWXXXFCFFXXSGWXLGVGWXCGFWAVWGCLXXFXLXVVFFPPRGWVFFFGGPRRGPWVLRFFPRPRCSGPPGLVXGLCLGGGGFFWVFSGXWGALGASCPPGGFLPXLLWFLLPLAGPVLVLXXSLGGGRGXFFFPLFPLFPFGGPPPAFRGSPWFSFFLWACFPGGLXXXXXXXXXXXXXXXXXXXXXXXXXXXXXXXXXXSNHACRSTLEDPPHL

SEQ ID NO: 2289 - DNA, 1603 bp, Homo sapiens
  source (1)..(1603)
  CDS (201)..(1403)
  modified_base (415): a, t, c, g, unknown or other
  modified_base (489): a, t, c, g, unknown or other
  modified_base (528)..(627): a, t, c, g, unknown or other
  modified_base (639): a, t, c, g, unknown or other
  modified_base (649): a, t, c, g, unknown or other
  modified_base (655)..(661): a, t, c, g, unknown or other
  modified_base (677): a, t, c, g, unknown or other
  modified_base (1108): a, t, c, g, unknown or other
  modified_base (1469): a, t, c, g, unknown or other
  modified_base (1501): a, t, c, g, unknown or other
  modified_base (1503): a, t, c, g, unknown or other
  modified_base (1506)..(1603): a, t, c, g, unknown or other
cccagctgggcggtggtcgggtcgtgaggcgggagggcgggagcgggggaagggaaaagcaaaagcggggaaagaagccggggagcggtggaccagacattcagacctcctgaaaggctcgtgcggaggcagaggcgggatcttccggaggtgagaattgttttgttattgtagcagaatggggaggaattgaggggaaaatggagatagaacctgaaagagccccaaacgcgagaacgtgtagctccccaagtgtaagatctcacagaagaactagactgaaaactaggcgtctgggaagcctgaatccttggaagagtggcatcatcatgaccctctgtgttctcacttataagtgggagctgaatgatgagaatactggacagatagagtgggggggggacaacaccactcnagcctgcctaggttgggctggaaaaggaaagcctaaaagaagagctatggatgccggaatagtacctgggggtnggatgaactgggcacataccacatggtcaggtttatttnnnnnnnnnnnnnnnnnnnnnnnnnnnnnnnnnnnnnnnnnnnnnnnnnnnnnnnnnnnnnnnnnnnnnnnnnnnnnnnnnnnnnnnnnnnnnnnnnnnnattcattggggnaaaagaactnggtggnnnnnnnaaaacccccctctctncttggcgtttttcccgggaaccctggcgtgctccctcctgtttctggcctccgcagcgggtgggccatcggccctgttggtggcttacacgaggcaatggtgtgctcagttccgttcttctggtcactgggggcacgtcggggtccggaaaagagacctcacagctcactcacctggggaggagggggggggtatctctggtcgtgctccgtcctgtctctgtgcctcgccgagcttgtgtcccagtcagccctgttggtggtggcttgctcgatggctatggtgtgctcaggacctgttttcctgtctctggggctgttctcccgttcctgtccgaagctttcaatgactttaaactcctatctctttgttgtggcctcccgtggcttgttcgctttgtttgatcttcttctcggcgcctgtctgctttngctctttgtctgcgatctccttccgcgttgtagcttatcgttctgcgctgttccgcctgataattgctccttccccctttcctttcttctcctatgctttttcctttctccttctctctccctttccttccggtcccttcttctgcactttcttgcttcgtttgttgtcttttcacctcttgcttttcctgcgcttcctgttctccccccgttcccttccccctatttgttttctttcctcctctgccgttcccccgcatgccttcatccggtcccgtcggcccttacctcttaattttgtttcttgttctcctttctcctcctatgttatcttcggttgctccttttctctcttcgtatnagctcaaaacaatataaataacgctcctattntnttnnnnnnnnnnnnnnnnnnnnnnnnnnnnnnnnnnnnnnnnnnnnnnnnnnnnnnnnnnnnnnnnnnnnnnnnnnnnnnnnnnnnnnnnnnnnnnnnnn

SEQ ID NO: 2290 - protein, 400 aa, Homo sapiens
  MOD_RES (72): Variable amino acid
  MOD_RES (97): Variable amino acid
  MOD_RES (110)..(143): Variable amino acid
  MOD_RES (147): Variable amino acid
  MOD_RES (150): Variable amino acid
  MOD_RES (152)..(154): Variable amino acid
  MOD_RES (159): Variable amino acid
  MOD_RES (303): Variable amino acid
MEIEPERAPNARTCSSPSVRSHRRTRLKTRRLGSLNPWKSGIIMTLCVLTYKWELNDENTGQIEWGGDNTTXACLGWAGKGKPKRRAMDAGIVPGGXMNWAHTTWSGLFXXXXXXXXXXXXXXXXXXXXXXXXXXXXXXXXXXSLGXKNXVXXXKPPSXLGVFPGNPGVLPPVSGLRSGWAIGPVGGLHEAMVCSVPFFWSLGARRGPEKRPHSSLTWGGGGGYLWSCSVLSLCLAELVSQSALLVVACSMAMVCSGPVFLSLGLFSRSCPKLSMTLNSYLFVVASRGLFALFDLLLGACLLXLFVCDLLPRCSLSFCAVPPDNCSFPLSFLLLCFFLSPSLSLSFRSLLLHFLASFVVFSPLAFPALPVLPPFPSPYLFSFLLCRSPACLHPVPSALTS

SEQ ID NO: 2291 - DNA, 1051 bp, Homo sapiens
  source (1)..(1051)
  CDS (201)..(851)
  modified_base (1)..(80): a, t, c, g, unknown or other
  modified_base (89): a, t, c, g, unknown or other
  modified_base (93)..(94): a, t, c, g, unknown or other
  modified_base (98)..(100): a, t, c, g, unknown or other
  modified_base (102)..(106): a, t, c, g, unknown or other
  modified_base (118): a, t, c, g, unknown or other
  modified_base (122): a, t, c, g, unknown or other
  modified_base (150)..(151): a, t, c, g, unknown or other
  modified_base (153): a, t, c, g, unknown or other
  modified_base (357): a, t, c, g, unknown or other
  modified_base (393): a, t, c, g, unknown or other
  modified_base (405): a, t, c, g, unknown or other
  modified_base (437): a, t, c, g, unknown or other
  modified_base (756): a, t, c, g, unknown or other
  modified_base (836): a, t, c, g, unknown or other
  modified_base (839): a, t, c, g, unknown or other
  modified_base (988): a, t, c, g, unknown or other
  modified_base (1047)..(1051): a, t, c, g, unknown or other
nnnnnnnnnnnnnnnnnnnnnnnnnnnnnnnnnnnnnnnnnnnnnnnnnnnnnnnnnnnnnnnnnnnnnnnnnnnnnnnngagttgacntttnnggcnnncnnnnntttttcggggtnaagnggcgactttcgttttgtcgcctgcctcnngnctaagaatacgcctcttactggtgttctctgtattttctgaatttgcatgttgggggggctcgctaggttggggaagatatcctgggtaatatccagaagtgtgttttccagcttgtttccattctccccatgtccttcaggtaggtactccagtcaatcattggttcggtctttttacgagatcttttatttcttggaggctntgttattggggggggggctttattctctacccttcncttcctgccttntttcgggggggggggggggcgcacctctcctntgctttttttccgtttggttgatttgtgtattgcttcgttgtgtatgctttctcgcggttgttagtgctgtggctttcctcttccctgggggttgttttcgctcctcccctgcgccggtgttgcctcgtggctcggcctttggctgttctctggtcttggggcgcttcccctcccggcgcccttgtggcggtatggtttggtgtcgtgcgggtgtgggggtcttgtggttcgtccgtgctcctttcctccccgccgatcgccttttcctttccgcggttccgcctattttttttccccctaattccgttgtaagtgcgngcgcccgcccccttcgttgttgtgaatatgttgtttgggggttccgttgtgggttgttcaggggtgccgtgctactcgcnggngcggtcttgtgaccttgttccctgtgttgttgtccgcgcccctcttgtctcgtgggcccccggtgttgtcggggcgttgctactatgcagtccgtgcgactgtcgcgttcaccacctcgatctccggtgatcgcttcgggtttgtttgnatcctcggccggttcccttacaaccatatttgatcacgttgaaccatgacctaatgcannnnn

SEQ ID NO: 2292 - protein, 216 aa, Homo sapiens
  MOD_RES (53): Variable amino acid
  MOD_RES (65): Variable amino acid
  MOD_RES (69): Variable amino acid
  MOD_RES (79): Variable amino acid
  MOD_RES (186): Variable amino acid
  MOD_RES (212)..(213): Variable amino acid
MLGGLARLGKISWVISRSVFSSLFPFSPCPSGRYSSQSLVRSFYEIFYFLEAXLLGGGLYSLPFXSCLXSGGGGGAPLXCFFSVWLICVLLRCVCFLAVVSAVAFLFPGGCFRSSPAPVLPRGSAFGCSLVLGRFPSRRPCGGMVWCRAGVGVLWFVRAPFLPADRLFLSAVPPIFFPPNSVVSAXARPLRCCEYVVWGFRCGLFRGAVLLXXAVL

SEQ ID NO: 2293 - DNA, 1453 bp, Homo sapiens
  source (1)..(1453)
  CDS (201)..(1253)
  modified_base (1)..(190): a, t, c, g, unknown or other
  modified_base (208): a, t, c, g, unknown or other
  modified_base (218): a, t, c, g, unknown or other
  modified_base (460)..(461): a, t, c, g, unknown or other
  modified_base (463)..(464): a, t, c, g, unknown or other
  modified_base (466): a, t, c, g, unknown or other
  modified_base (481): a, t, c, g, unknown or other
  modified_base (501): a, t, c, g, unknown or other
  modified_base (669): a, t, c, g, unknown or other
  modified_base (736): a, t, c, g, unknown or other
  modified_base (747): a, t, c, g, unknown or other
  modified_base (768): a, t, c, g, unknown or other
  modified_base (844): a, t, c, g, unknown or other
  modified_base (1028): a, t, c, g, unknown or other
  modified_base (1083)..(1182): a, t, c, g, unknown or other
  modified_base (1201)..(1202): a, t, c, g, unknown or other
  modified_base (1213): a, t, c, g, unknown or other
nnnnnnnnnnnnnnnnnnnnnnnnnnnnnnnnnnnnnnnnnnnnnnnnnnnnnnnnnnnnnnnnnnnnnnnnnnnnnnnnnnnnnnnnnnnnnnnnnnnnnnnnnnnnnnnnnnnnnnnnnnnnnnnnnnnnnnnnnnnnnnnnnnnnnnnnnnnnnnnnnnnnnnnnnnnnnnnnnnnnnnnnnnnnnnatccctggtcatgctgcngcgtaccgcnactctgaaggacgccagcagattctaccctttctccacaacaccatcttttgcctctatcagtggtttatctatcttgtggaatagtcacattcttatgtgtcttgcaaccacatccagctgttggtccctggaggcagtgtgtctcatacatttttggacccttcactcaagatctttgtgtcttgctgcttgctcggagtataccacgtgctcactgtgtaaagtgggaggtgtgtttgnntnntnagtgttggggttttnggggtgtcctctcgtgtggnggtgtcggggtccccccctttggtgggtttttggttgccccgtgggtcgtgggggtgtcggcgggggggggggggtggggggggggggccccctcgctctctgtttttgtgtctgggggtgtggcgtgtgtgcgtgttcctccccctccggggggggcgcggccgggnttgcggcgcggtgtcggcgccggggcgcgtggttggcgggctttctgcgttctttcccctttcttcncgggggcgggncgggtcgctttcgtcgttgcnggcgcccgccgggcgggtcgtctgcttgtctttttgttggggtggtggttcggtcttttctctggttgcgttgtcnttgtttgtttgttcgttttgcgtggcgctgtgtctgcgcccggcggcgtggtgtgtgtgtcttttttttgcggcgttctgtgcgcgccgccgtcgcgcgggggcgggcggggtggcggtgtgtttttgcgtgtgttattgtttgtgggggggtgttgccttgctttgtgttttttcgtgctgtntctgttgcggtgtgctgtggtgtgggtgttgtaaaaaaaaaaaaaaaattatgtnnnnnnnnnnnnnnnnnnnnnnnnnnnnnnnnnnnnnnnnnnnnnnnnnnnnnnnnnnnnnnnnnnnnnnnnnnnnnnnnnnnnnnnnnnnnnnnnnnnnacctcaaggctgcgatgcnncgtcgggcggnctctaaaggacaccctctcttggtttttcattgtatataaagttcaggcctaatatgcctgtcgcaactaaaaagaagagtgatctggtgtggcaatattggagtaattcttttattatcatagatttgatgttacaaagattttttcaaacttttcttcatgaagttttatgaattttaggttttctcttaagtgtctgatctattttgaatgagttcttatatatagtgtcaggtatg

SEQ ID NO: 2294 - protein, 350 aa, Homo sapiens
  MOD_RES (3): Variable amino acid
  MOD_RES (6): Variable amino acid
  MOD_RES (87)..(89): Variable amino acid
  MOD_RES (94): Variable amino acid
  MOD_RES (101): Variable amino acid
  MOD_RES (157): Variable amino acid
  MOD_RES (179): Variable amino acid
  MOD_RES (183): Variable amino acid
  MOD_RES (190): Variable amino acid
  MOD_RES (215): Variable amino acid
  MOD_RES (276): Variable amino acid
  MOD_RES (295)..(328): Variable amino acid
  MOD_RES (334): Variable amino acid
  MOD_RES (338): Variable amino acid
MLXRTXTLKDASRFYPFSTTPSFASISGLSILWNSHILMCLATTSSCWSLEAVCLIHFWTLHSRSLCLAACSEYTTCSLCKVGGVFXXXVLGFXGCPLVWXCRGPPLWWVFGCPVGRGGVGGGGGVGGGGPLALCFCVWGCGVCACSSPSGGGAAGXAARCRRRGAWLAGFLRSFPFLXGGGXGRFRRCXRPPGGSSACLFVGVVVRSFLWLRCXCLFVRFAWRCVCARRRGVCVFFLRRSVRAAVARGRAGWRCVFACVIVCGGVLPCFVFFRAXSVAVCCGVGVVKKKKKLCXXXXXXXXXXXXXXXXXXXXXXXXXXXXXXXXXXLKAAMXRRAXSKGHPLLVFHCI

SEQ ID NO: 2295 - DNA, 1297 bp, Homo sapiens
  source (1)..(1297)
  CDS (201)..(1097)
  modified_base (1)..(58): a, t, c, g, unknown or other
  modified_base (89): a, t, c, g, unknown or other
  modified_base (93): a, t, c, g, unknown or other
  modified_base (110): a, t, c, g, unknown or other
  modified_base (275): a, t, c, g, unknown or other
  modified_base (280): a, t, c, g, unknown or other
  modified_base (710): a, t, c, g, unknown or other
  modified_base (943)..(1042): a, t, c, g, unknown or other
  modified_base (1076): a, t, c, g, unknown or other
nnnnnnnnnnnnnnnnnnnnnnnnnnnnnnnnnnnnnnnnnnnnnnnnnnnnnnnnnnattggtgttggggagtgacaggatgggcagngcgntgcctgctctgaggatnccgaaacgtgaagtcattatgaaatatactatttaatgcttgtctgaaaaggttggttttgctattaccttaatgatgagtccatagtgaatgacaacgagtacatttttaaacataattttgcttcttaataaagaggttcttactaaaggggttctttatttncgttntatctgttttttttttggcgcgcgccccttctctggggggggggggttcttgtgttttgtgggggggatggatcttgttcggtgggggttcgtgttcctggcgttcgcggcttgggctcgtttcttttgctgggtagtgtgtatcgtgtgggcttgtgttgtggttgcccgggggttgtttgtgtgtgtgggggggtttgttttctgcggattgttctcttgttccgtcttctgttcgggtgtgggtggctgtcggtggcggggcgttgtgttgtgtttgtgttcggtggcctgtgtcgggttcgtgtgttctagctggcgcgcctgctttgttgggtggctcggtgtgccgccgttgtgctgtggttgttgttgtgttgtggtcggggggtgctccgcggttggggtctcgcggcgcgtggttttgtgnggcctcttttgcgccgccgtccggtttttcgggtgggtattttgcccgcggtttgtcccgcttcgggcccttcccccctttgttgtggctgttttgccgggccatccaatatgttccgcttgtgtactcctttgtgggcggcgcattccgtgttttttgttttcgcgcgggctgtttctgggctggtgggcgctcgttgtattccgcccgcttgctggaaacggaaataaatnnnnnnnnnnnnnnnnnnnnnnnnnnnnnnnnnnnnnnnnnnnnnnnnnnnnnnnnnnnnnnnnnnnnnnnnnnnnnnnnnnnnnnnnnnnnnnnnnnnngactggggttgctagactgcggtgcggctctagnaggatccctttttttttttgagacggattctcgctctgtcccccaggctggagtgcagtggtgcgatctcggctcactgcaaactccacctcccgggttcatgccattctcctgcctcagcctcccgagtagctgagactacaggcgcccgccaccacgcccggctaagttttttgtattttattagagacgggggtttcaccgtgttagccaggatggtc

SEQ ID NO: 2296 - protein, 298 aa, Homo sapiens
  MOD_RES (25): Variable amino acid
  MOD_RES (27): Variable amino acid
  MOD_RES (170): Variable amino acid
  MOD_RES (248)..(281): Variable amino acid
  MOD_RES (292): Variable amino acid
MTTSTFLNIILLLNKEVLTKGVLYXRXICFFFGARPFSGGGGFLCFVGGMDLVRWGFVFLAFAAWARFFCWVVCIVWACVVVARGLFVCVGGFVFCGLFSCSVFCSGVGGCRWRGVVLCLCSVACVGFVCSSWRACFVGWLGVPPLCCGCCCVVVGGCSAVGVSRRVVLXGLFCAAVRFFGWVFCPRFVPLRALPPFVVAVLPGHPICSACVLLCGRRIPCFLFSRGLFLGWWALVVFRPLAGNGNKXXXXXXXXXXXXXXXXXXXXXXXXXXXXXXXXXXTGVARLRCGSXRIPFFF

SEQ ID NO: 2297 - DNA, 1324 bp, Homo sapiens
  source (1)..(1324)
  CDS (201)..(1124)
  modified_base (28)..(127): a, t, c, g, unknown or other
  modified_base (139): a, t, c, g, unknown or other
  modified_base (143)..(144): a, t, c, g, unknown or other
  modified_base (152): a, t, c, g, unknown or other
  modified_base (352): a, t, c, g, unknown or other
  modified_base (371): a, t, c, g, unknown or other
  modified_base (383)..(384): a, t, c, g, unknown or other
  modified_base (389): a, t, c, g, unknown or other
  modified_base (407): a, t, c, g, unknown or other
  modified_base (456): a, t, c, g, unknown or other
  modified_base (476): a, t, c, g, unknown or other
  modified_base (514): a, t, c, g, unknown or other
  modified_base (531): a, t, c, g, unknown or other
  modified_base (986): a, t, c, g, unknown or other
  modified_base (1092): a, t, c, g, unknown or other
  modified_base (1133)..(1232): a, t, c, g, unknown or other
  modified_base (1269): a, t, c, g, unknown or other
gaaattataagggcccatggggctcaannnnnnnnnnnnnnnnnnnnnnnnnnnnnnnnnnnnnnnnnnnnnnnnnnnnnnnnnnnnnnnnnnnnnnnnnnnnnnnnnnnnnnnnnnnnnnnnnnnnctccatgcttgncagnnccgggtgncgactctaaggatacctgcgcaatgatcctgtgctggtaattctacacatgcagaaactcaaagttgaaaggaaccttaaaattgatcttgctcgatgccctcacttcaaagtttgtacgtggcccaacatttatatgttgttgttggtatatgtgtgtgttcttagaatttgttacctagattttttttttgttatggngttttgctcttgttgcccngggtggggtgcnntgggncgatctcggctcactgcngcctccgcctctgggttcgggcggttctcctgcctcggcctgcgcggtngctggggtgtcgggcttgcncctgcgcgcccggctgcttttttgtgtttgtggtcgtnccggggggtgttcctgntgctgcgggttggtccgggctgcgtggcgtggcgggccggcgggggtgtcgtcttctgtctttgggctgccgcgcggggggcccggtgcccgttctgcttctgtcctgtctcctttcgcttctttttcgccccccgccctgccccgcgggcggcgctggcgtcttcccccggggtgtgtgcgcccgcgcgcgtccgggtgtgggtcgcgtcccgcgggcccggggttgttttttttctcggttttttgttctttttgcgcctctttgtgctggcgggcggttgtgtggtggggcgtctgtcggcgttgccggtgcggcgtcctgtgttgttgcgtgtggtgtgctggtcttgctcgtctgtggctgccccctcgctctccgtctcgctgtgttggccttctctcgcgcgcgcggccccgtgcctctgggcggtgcgcggcggcggtgctgggctnttctcctgttcttcgttccctgcctgctggcttgtcctcgttggctcgtccttggttcggtggtgcttggtgcgggtggctcgctgcgtgtcgtgcggcgccggtnctctgttttcgatgatagtgaaatatatataaataaaaatnnnnnnnnnnnnnnnnnnnnnnnnnnnnnnnnnnnnnnnnnnnnnnnnnnnnnnnnnnnnnnnnnnnnnnnnnnnnnnnnnnnnnnnnnnnnnnnnnnnnaccttagggcttgacagacctgccttgcggctctagnagatcccctggcaatctaaattgtggggacattctctacacattttgatggcatt

SEQ ID NO: 2298 - protein, 307 aa, Homo sapiens
  MOD_RES (51): Variable amino acid
  MOD_RES (57): Variable amino acid
  MOD_RES (61)..(63): Variable amino acid
  MOD_RES (69): Variable amino acid
  MOD_RES (86): Variable amino acid
  MOD_RES (92): Variable amino acid
  MOD_RES (105): Variable amino acid
  MOD_RES (111): Variable amino acid
  MOD_RES (262): Variable amino acid
  MOD_RES (298): Variable amino acid
MQKLKVERNLKIDLARCPHFKVCTWPNIYMLLLVYVCVLRICYLDFFFVMXFCSCCXGWGXXXRSRLTXASASGFGRFSCLGLRGXWGVGLXPARPAAFLCLWSXRGVFLXLRVGPGCVAWRAGGGVVFCLWAAARGARCPFCFCPVSFRFFFAPRPAPRAALASSPGVCAPARVRVWVASRGPGVVFFLGFLFFLRLFVLAGGCVVGRLSALPVRRPVLLRVVCWSCSSVAAPSLSVSLCWPSLARAAPCLWAVRGGGAGXFSCSSFPACWLVLVGSSLVRWCLVRVARCVSCGAGXLFSMIVKYI

SEQ ID NO: 2299 - DNA, 1225 bp, Homo sapiens
  source (1)..(1225)
  CDS (201)..(1025)
  modified_base (1)..(60): a, t, c, g, unknown or other
  modified_base (72): a, t, c, g, unknown or other
  modified_base (77): a, t, c, g, unknown or other
  modified_base (99): a, t, c, g, unknown or other
  modified_base (274): a, t, c, g, unknown or other
  modified_base (333): a, t, c, g, unknown or other
  modified_base (353): a, t, c, g, unknown or other
  modified_base (760): a, t, c, g, unknown or other
  modified_base (865): a, t, c, g, unknown or other
  modified_base (942): a, t, c, g, unknown or other
  modified_base (1040)..(1139): a, t, c, g, unknown or other
nnnnnnnnnnnnnnnnnnnnnnnnnnnnnnnnnnnnnnnnnnnnnnnnnnnnnnnnnnnnctccaagcttgncagcnctgccgtgcgctctagaggatnactgttcacctgaggtcaggagttcgagtactagcctgaccaacatagagaaaccccgtctccactaaaaatagaaaaaaattagccaggcgtggtggtaaatgcctgtaatcccagctacttgggaggctaggcaggagaagcgcttgaacctgggaggtggaggttgcggtgngccgtgttctttctcttgcgctccggcctgggcggggggggtgtgtctccttctctttnttgtcttttttgtttctttngtctgtggctttcgcgttggggtttcttgctcccggtttttcgctccttctttcccttgtggtctccccctcttttctcgttgtgtttgtgtctttctttttttttgttgtgtctctcgtcccgggttgtttttttttctggtttcttcgtgccttcgcctcgtcttttcgtctgtggttttcgcgttcttgtttgtttttttgttttttgttttcggttttcttcttgttgtttgtcttcggtgtttcggtcttgtttttgtctgtgtggtggttctctgcggcctccttctcctgtctctctgttttgctctttgtgtcttcttctcgttctctttttctttcttttctttgttcgccgttttcgcggtggcgtgcgctcgttttgttgtttgtgtgtgttgcgntggttgtgtcttgtgtgcgttgtccggctttctgcgtgtttctttccgtctggtggttcttttgtttttctggctgtttgtgggttgtgttgtggcccgcggctntggtctgggttcttgttcttgtgttttgtctttgttcggttggggcggtgtcttcgctgctgctcgtgcgtgggttnctgtcgctgtgtgtggtttgttcgtgttctgttggctcgcgtgtgctctcctgtggtctcctgtttgtcggctcgaattatgaaaagacaaaaaaggnnnnnnnnnnnnnnnnnnnnnnnnnnnnnnnnnnnnnnnnnnnnnnnnnnnnnnnnnnnnnnnnnnnnnnnnnnnnnnnnnnnnnnnnnnnnnnnnnnnncgctaggacttgacatgcctcgcgttgcgactctagaagatccccttcaggtcccgttagtgggcgccagtccttccttcaaccat

SEQ ID NO: 2300 - protein, 274 aa, Homo sapiens
  MOD_RES (25): Variable amino acid
  MOD_RES (45): Variable amino acid
  MOD_RES (51): Variable amino acid
  MOD_RES (187): Variable amino acid
  MOD_RES (222): Variable amino acid
  MOD_RES (248): Variable amino acid
MPVIPATWEARQEKRLNLGGGGCGXPCSFSCAPAWAGGVCLLLFXVFFVSXVCGFRVGVSCSRFFAPSFPCGLPLFSRCVCVFLFFCCVSRPGLFFFLVSSCLRLVFSSVVFAFLFVFLFFVFGFLLVVCLRCFGLVFVCVVVLCGLLLLSLCFALCVFFSFSFSFFSLFAVFAVACARFVVCVCCXGCVLCALSGFLRVSFRLVVLLFFWLFVGCVVARGXGLGSCSCVLSLFGWGGVFAAARAWVXVAVCGLFVFCWLACALLWSPVCRLEL

SEQ ID NO: 2301 - DNA, 1003 bp, Homo sapiens
  source (1)..(1003)
  CDS (201)..(803)
  modified_base (130): a, t, c, g, unknown or other
  modified_base (244): a, t, c, g, unknown or other
  modified_base (417): a, t, c, g, unknown or other
  modified_base (428): a, t, c, g, unknown or other
  modified_base (830)..(929): a, t, c, g, unknown or other
  modified_base (954): a, t, c, g, unknown or other
aagccaagccaggcatggtggctcacacccatactcccaccactttgggaggctgaggtgggaagattggttaagctcaggagttcgagaccagcctgggcaacatagggagacccatctctaattccanaggccaggaactgggcgcggtggctctcacctgtaatcccggcgctctgggcggcctcggctggcgggtcatgtgtggtgcggcgtgtccggggggtctggcgggtgtggtttnttttctctgtgcctggtggttttttggtgcttcccctctctggcgcttggttgggggtgcggctttggccgggggttgtctcggtggggtggttggtggtggcgttttgttgggtggtggttgtgggctttgttcttttctttgctttgtttttttttctctttgttttttgnttgtttgtttntttgttctttgtgttttgtcttcggcgcgtgcgttgtcgttccttcttgccctccccgcggctgtgtctgtggcgctctgtggtggctgcgggcggctgtgggtgggcggcgccgctggtgtcggctgcgtcgcggggctctccgcgttctgcgctcgcgcttgcgtctctcgggctgtctggtggccgtggtgcggtggtcctggttttgtctcgcgcgcgcttgctgttggggtgtcgttgcgcttgggttcgcgcgtggtgtgcgtgtgtgcgcttcttctggtgcggtttcctctctctgtcgtcgtccttcttccgcgcccgttgttgtcgtctggtggtcgtgtctcgccggctgcggctctcgcttgaggaagcaaatagaagaaaaaaagaagnnnnnnnnnnnnnnnnnnnnnnnnnnnnnnnnnnnnnnnnnnnnnnnnnnnnnnnnnnnnnnnnnnnnnnnnnnnnnnnnnnnnnnnnnnnnnnnnnnnnacctcagacttgatgcgctgctggngcgactctaaagaccccctgcgttcttatcttgccgggaggagaactgg

SEQ ID NO: 2302 - protein, 200 aa, Homo sapiens
  MOD_RES (15): Variable amino acid
  MOD_RES (73): Variable amino acid
  MOD_RES (76): Variable amino acid
MCGAACPGGLAGVVXFLCAWWFFGASPLWRLVGGAALAGGCLGGVVGGGVLLGGGCGLCSFLCFVFFSLCFLXVCXFVLCVLSSARALSFLLALPAAVSVALCGGCGRLWVGGAAGVGCVAGLSAFCARACVSRAVWWPWCGGPGFVSRALAVGVSLRLGSRVVCVCALLLVRFPLSVVVLLPRPLLSSGGRVSPAAALA

SEQ ID NO: 2303 - DNA, 1243 bp, Homo sapiens
  source (1)..(1243)
  CDS (201)..(1043)
  modified_base (26)..(126): a, t, c, g, unknown or other
  modified_base (142): a, t, c, g, unknown or other
  modified_base (385): a, t, c, g, unknown or other
  modified_base (421): a, t, c, g, unknown or other
  modified_base (425): a, t, c, g, unknown or other
  modified_base (473): a, t, c, g, unknown or other
  modified_base (512): a, t, c, g, unknown or other
  modified_base (719): a, t, c, g, unknown or other
  modified_base (803): a, t, c, g, unknown or other
  modified_base (817): a, t, c, g, unknown or other
  modified_base (850): a, t, c, g, unknown or other
  modified_base (884): a, t, c, g, unknown or other
  modified_base (906)..(907): a, t, c, g, unknown or other
  modified_base (913)..(916): a, t, c, g, unknown or other
  modified_base (921): a, t, c, g, unknown or other
  modified_base (923)..(924): a, t, c, g, unknown or other
  modified_base (926): a, t, c, g, unknown or other
  modified_base (939): a, t, c, g, unknown or other
  modified_base (947): a, t, c, g, unknown or other
  modified_base (968): a, t, c, g, unknown or other
  modified_base (975): a, t, c, g, unknown or other
  modified_base (988): a, t, c, g, unknown or other
  modified_base (992)..(996): a, t, c, g, unknown or other
  modified_base (1004)..(1005): a, t, c, g, unknown or other
  modified_base (1009)..(1011): a, t, c, g, unknown or other
  modified_base (1015): a, t, c, g, unknown or other
  modified_base (1024)..(1025): a, t, c, g, unknown or other
  modified_base (1062)..(1161): a, t, c, g, unknown or other
  modified_base (1179): a, t, c, g, unknown or other
  modified_base (1195): a, t, c, g, unknown or other
ccttgtactgatatagaagaaagatnnnnnnnnnnnnnnnnnnnnnnnnnnnnnnnnnnnnnnnnnnnnnnnnnnnnnnnnnnnnnnnnnnnnnnnnnnnnnnnnnnnnnnnnnnnnnnnnnnnnngcgttagcttgcaagnctgcggtcgagtctaaagcatcccttatgggtgtgcatgtgtttattcatgcatcctcatgtacaggtgtgtgtgtgcttatgcatgtgtccccgtgtacaagggtgtgtgtgtgtgtttatgcatgcattcccatgtacagaggtgtgtatgcatgtttatgcatgcatcctggtgtacaagggtgggtgtgtgtgtgtatgcatgcatccccatgtacaggtgtgtgtgtgtgtttatgcncgtatccctgtgtacagggatgtgtgtccatgtttntgcntgcgtccccatgtcccggtgtgtgtgtgtgtttatgcacgtgtccccntgtcccggttgtgtgtgtgtgtttccgcccctgtcctcntgttctggtgggtgcgggtgtttgtgcggtgcgttcccctgtcccggtgtgtcggtgtggtctctgcgcgtgtcccctccccccgcgcggcccccgtccctccctttcctccccttctcccctctgttttgtggtttcggcccggtgcgtcctccctgcgcgcgcccgcggtgttgggtgttggtttcgtcccccgccgtcgttgtngcggccgcgggtttcccccccctctttgcctccgctttttttccctctgttcttgtgctccctcctcgccgctcgtccgttttnctctttttttgtcntccccccttctcttctcttcgtggtttttctcntttcttttgcttgttcttttttccgccctttttnttttttcgttcttttttttccnngcgggnnnnccgtntnngngttgtgttctctncgtttttntgcgttctctttttttttttnaaatttntttttgtgttttntgtnnnnntttgcggnngggnnntttntctgttgtnnttttttgtttttttataaaaaaaataaatctttttannnnnnnnnnnnnnnnnnnnnnnnnnnnnnnnnnnnnnnnnnnnnnnnnnnnnnnnnnnnnnnnnnnnnnnnnnnnnnnnnnnnnnnnnnnnnnnnnnnnactgagctatgcataccngcgcttcggctctagnagatccccatatagtgagatcccattcctatcaaactaatctctgtat

SEQ ID NO: 2304 - protein, 280 aa, Homo sapiens
  MOD_RES (62): Variable amino acid
  MOD_RES (74)..(75): Variable amino acid
  MOD_RES (91): Variable amino acid
  MOD_RES (104): Variable amino acid
  MOD_RES (173): Variable amino acid
  MOD_RES (201): Variable amino acid
  MOD_RES (206): Variable amino acid
  MOD_RES (217): Variable amino acid
  MOD_RES (228): Variable amino acid
  MOD_RES (236): Variable amino acid
  MOD_RES (238)..(239): Variable amino acid
  MOD_RES (240)..(242): Variable amino acid
  MOD_RES (247): Variable amino acid
  MOD_RES (249): Variable amino acid
  MOD_RES (256): Variable amino acid
  MOD_RES (259): Variable amino acid
  MOD_RES (263)..(266): Variable amino acid
  MOD_RES (268)..(272): Variable amino acid
  MOD_RES (275): Variable amino acid
MYRCVCAYACVPVYKGVCVCLCMHSHVQRCVCMFMHASWCTRVGVCVYACIPMYRCVCVFMXVSLCTGMCVHVXXCVPMSRCVCVFMHVSXCPGCVCVFPPLSXCSGGCGCLCGAFPCPGVSVWSLRVSPPPARPPSLPFLPFSPLFCGFGPVRPPCARPRCWVLVSSPAVVXAAAGFPPLFASAFFPSVLVLPPRRSSVXLFFCXPPFSSLRGFSXFFCLFFFPPFXFFRSFFSXRXXRXXVVFSXFXCVLFFFXKFXFVFXXXXCXXXXXLLXFFVFL

SEQ ID NO: 2305 - DNA, 1282 bp, Homo sapiens
  source (1)..(1282)
  CDS (201)..(1082)
  modified_base (240): a, t, c, g, unknown or other
  modified_base (261): a, t, c, g, unknown or other
  modified_base (856)..(955): a, t, c, g, unknown or other
  modified_base (967): a, t, c, g, unknown or other
  modified_base (969): a, t, c, g, unknown or other
  modified_base (990): a, t, c, g, unknown or other
  modified_base (995): a, t, c, g, unknown or other
  modified_base (1013): a, t, c, g, unknown or other
  modified_base (1033): a, t, c, g, unknown or other
  modified_base (1156): a, t, c, g, unknown or other
  modified_base (1185): a, t, c, g, unknown or other
  modified_base (1192): a, t, c, g, unknown or other
  modified_base (1196): a, t, c, g, unknown or other
  modified_base (1212)..(1213): a, t, c, g, unknown or other
  modified_base (1222): a, t, c, g, unknown or other
  modified_base (1252): a, t, c, g, unknown or other
ctaattgttcttggtcaaagacattacctggcatttgatcttcagacaggcctcttgcagtaaatgcatttcagattcaattgggaagctcagtgatctcatagaagcataataaagacatcacttgcccagaacccctgaggttagagtgtcctagaaggattaaaagccatttcactgaatgttcttcttcaaagtgaatgaatattccaatgagtacagctgtttttttaagtggtngcttgatttactgttctgatnagtctgctgaagtgtgtttgacccttctcagagatttagcaggctttccaccttgtttgcgccttcttccccggattgctggatttatcctctccttgctgctgctgttgctattcgggcctccgcctgttgtgggttcattctcgttgcgctctccttgtcgcccccctcccggtttcgctccttctgctccgtgcctttgctcccgcgtcctcttttctgctctcgcgctgcgcgcttgctctgttttgggtgcccgggtccctccctctttgttttttttcgtcgctgcccctcgttcctttttggggccctttctgttttttttttgttttgggtctcttccgggttcctcgttttttttcttcgccctttgtgttctgttgttttgggcgctcttcggccccctcgtgtgtgtttttgcttcgttcttcccgcgtggtctggctttttcttcccgcccttgccgcgtcgtggtcttctcttgtctgtgtctcgctcttgcccccgtgcgtttccgtgtcttttgctcggcgcgccttgtggtttttctccttctcggtccggtcgatgacaaaactaaaaaaataaaatnnnnnnnnnnnnnnnnnnnnnnnnnnnnnnnnnnnnnnnnnnnnnnnnnnnnnnnnnnnnnnnnnnnnnnnnnnnnnnnnnnnnnnnnnnnnnnnnnnnnatcccctgatcngntacaggctgcatcgcgcctgnggagngcattcttatcctcgaanaagcctttgtttgtcatgtngcttgtgataaccacattgttgcctttggcttgcggcactgcgaagtgagagtaagtgaatgtcacatcgtttggatcaagacccatttgcagcacaagccctgttttgttcagcggcttgtnagggccggtttatagagtttgatacatanccaagcntgtnaatatcgtttgagttnntaccatcgntcgtcattagtgaaccgcgtgattctgtgnacttgtcccatttgccgttctttttgaaaa

SEQ ID NO: 2306 - protein, 293 aa, Homo sapiens
  MOD_RES (14): Variable amino acid
  MOD_RES (21): Variable amino acid
  MOD_RES (219): Variable amino acid
  MOD_RES (252): Variable amino acid
  MOD_RES (256)..(257): Variable amino acid
  MOD_RES (264)..(265): Variable amino acid
  MOD_RES (271): Variable amino acid
  MOD_RES (279): Variable amino acid
MNIPMSTAVFLSGXLIYCSDXSAEVCLTLLRDLAGFPPCLRLLPRIAGFILSLLLLLLFGPPPVVGSFSLRSPCRPPPGFAPSAPCLCSRVLFSALALRACSVLGARVPPSLFFFVAAPRSFLGPFLFFFCFGSLPGSSFFFFALCVLLFWALFGPLVCVFASFFPRGLAFSSRPCRVVVFSCLCLALAPVRFRVFCSARLVVFLLLGPVDDKTKKIKXXXXXXXXXXXXXXXXXXXXXXXXXXXXXXXXXXSPDXXQAASRLXXAFLSSXKPLFVMXLVITTLLPLACGTAK

SEQ ID NO: 2307 - DNA, 1258 bp, Homo sapiens
  source (1)..(1258)
  CDS (201)..(1058)
  modified_base (68)..(167): a, t, c, g, unknown or other
  modified_base (745): a, t, c, g, unknown or other
  modified_base (886)..(985): a, t, c, g, unknown or other
  modified_base (1013): a, t, c, g, unknown or other
  modified_base (1032): a, t, c, g, unknown or other
  modified_base (1037): a, t, c, g, unknown or other
  modified_base (1067): a, t, c, g, unknown or other
ggtatgtttgttttttttgttttttttttttgtttctttatgtttatcatatgaacaacatcacaacnnnnnnnnnnnnnnnnnnnnnnnnnnnnnnnnnnnnnnnnnnnnnnnnnnnnnnnnnnnnnnnnnnnnnnnnnnnnnnnnnnnnnnnnnnnnnnnnnnnnggactttgttgctagggtcaattcgttctaaggatggcttctgcttgttgttttgctgtgctattctgcattgctgtggatattctgcgttgtcgtgttgctgtgggtattctgtattgctgtgggtattctgtattgctgtggatattctgtattgttgttttgctgtggatattctgtattgctgtgggtattctgtattgctgtggatattctgtattgttgtggatattctgtattgttgttttgctgtgcatattctgcattgctgtggatattctgcattgtcgtattgctgtgggtattctgtattgctgtggatattctgtattgctgtgggtattctgtattgctgtggatattctgtattgctgtggatattctgtattgctgtggatattctgtattgttgttttgctgtggatattctgtattgctgtggatattctgtattgctgtggatattctgtattgttgtggatattctgtattgctgtgggtattctgtattgttgttttgctgtggatattctgtattgctgtgggtattctgtattgctgtggatattctgtattgntggggatattctgtattgttgttttgctgtggatattctgtattgctgtgggtattctggattggtggtttgctggggatattctgtattgctgtggatattctgtattgctggggatattctgtattgctcgcttgctgnnnnnnnnnnnnnnnnnnnnnnnnnnnnnnnnnnnnnnnnnnnnnnnnnnnnnnnnnnnnnnnnnnnnnnnnnnnnnnnnnnnnnnnnnnnnnnnnnnnnaagggttttttgggaggaacctttggtncgagggatcccattttgtnaaagnggagggcttcctcttttataaaatggtgcnttgtggtggacaggtttaaaagaagaccgtgggggtatagagaaaatagaggccattcttaaggaacttgaaaagccagcaccctgatgcgaccacgttttagtctacgtttatctgtctttacttaatgtcctttgttacaggccagaatgtttttctggcctgaatattctctctggggcgggtgttcc

SEQ ID NO: 2308 - protein, 285 aa, Homo sapiens
  MOD_RES (182): Variable amino acid
  MOD_RES (229)..(262): Variable amino acid
  MOD_RES (271): Variable amino acid
  MOD_RES (278)..(279): Variable amino acid
MASACCFAVLFCIAVDILRCRVAVGILYCCGYSVLLWIFCIVVLLWIFCIAVGILYCCGYSVLLWIFCIVVLLCIFCIAVDILHCRIAVGILYCCGYSVLLWVFCIAVDILYCCGYSVLLWIFCIVVLLWIFCIAVDILYCCGYSVLLWIFCIAVGILYCCFAVDILYCCGYSVLLWIFCIXGDILYCCFAVDILYCCGYSGLVVCWGYSVLLWIFCIAGDILYCSLAXXXXXXXXXXXXXXXXXXXXXXXXXXXXXXXXXXRVFWEEPLXRGIPFCXXGGLPLL

SEQ ID NO: 2309 - DNA, 1234 bp, Homo sapiens
  source (1)..(1234)
  CDS (201)..(1034)
  modified_base (142): a, t, c, g, unknown or other
  modified_base (152): a, t, c, g, unknown or other
  modified_base (156): a, t, c, g, unknown or other
  modified_base (166): a, t, c, g, unknown or other
  modified_base (176): a, t, c, g, unknown or other
  modified_base (179)..(180): a, t, c, g, unknown or other
  modified_base (186): a, t, c, g, unknown or other
  modified_base (209)..(308): a, t, c, g, unknown or other
  modified_base (382): a, t, c, g, unknown or other
  modified_base (504): a, t, c, g, unknown or other
  modified_base (733)..(734): a, t, c, g, unknown or other
  modified_base (759): a, t, c, g, unknown or other
  modified_base (819): a, t, c, g, unknown or other
  modified_base (854): a, t, c, g, unknown or other
  modified_base (860): a, t, c, g, unknown or other
  modified_base (875)..(876): a, t, c, g, unknown or other
  modified_base (900)..(901): a, t, c, g, unknown or other
  modified_base (903): a, t, c, g, unknown or other
  modified_base (915): a, t, c, g, unknown or other
  modified_base (918): a, t, c, g, unknown or other
  modified_base (920): a, t, c, g, unknown or other
  modified_base (969): a, t, c, g, unknown or other
  modified_base (1018): a, t, c, g, unknown or other
  modified_base (1025): a, t, c, g, unknown or other
  modified_base (1157)..(1158): a, t, c, g, unknown or other
  modified_base (1169): a, t, c, g, unknown or other
  modified_base (1172): a, t, c, g, unknown or other
  modified_base (1187): a, t, c, g, unknown or other
  modified_base (1203): a, t, c, g, unknown or other
  modified_base (1208): a, t, c, g, unknown or other
  modified_base (1228): a, t, c, g, unknown or other
  modified_base (1230): a, t, c, g, unknown or other
gtgcttggcactggtgcagctgcagctgcccgtcatcaggcttcccctggtgaccacttttcccagtcccttttcaatccattagttgacttcacccagcaatactaaaagcattctcttggcgtgtggcttggttctccgnttaccttttncccngtttctcccnctgccccggntcnnacaaangtacccacagtcccatgttagcnnnnnnnnnnnnnnnnnnnnnnnnnnnnnnnnnnnnnnnnnnnnnnnnnnnnnnnnnnnnnnnnnnnnnnnnnnnnnnnnnnnnnnnnnnnnnnnnnnnncttgggtctgtcgtgcttcttctttgctggttcttctgctgtctttcttgtgctcctcttcgccgtgcgctctnttgtccctgttcgtgtttgggcctgtctggtcgttcctttgggtggggggcgccgccgcctttcgggtgcttccctgggttgttgtgggggggcgggttggttggttttttttccccctgcncgccgcctcgcgccccttcctgtggtggtcttccccccctttttttttttttttcgctcgggttgttgggggtggggttttgttgtggcctgcgggcccccgcctggcggttgccctggcccctgtgttggttctcttgccttcttcctttctttccttcctcccccggggtgtggtgccctcccccccctttttctttttttttggcctggcccgtggttttgtcccnnggttggcttttttttgtttcttccngttctgtttttgttgttttctccggctccggcttggggtgtgttgttgcttcccctttcngttccccccggttttctttggggcttgggtgtgtnttcggncctgcctcgttcccnnccctctgctctttcctccgtgtgnntngtggtgcttttnttngngcttttttccccgcctctctgggggttggctccgccctggtctttttgngctgccccccccccccctgtttttttttttttaggggtgttggcccccngtcttcntctacgtaagagaataccccataaaaagacagaaatttcagatattttttccttgaaaatgtgtgttgaacattttgaacctttaagacacggttagctgttttgtttttattactcatacgttagttttgnnctgtatctttnttnctgcacgcctacccngcccttaaaatgtttnttgtncctttttccttccaaacggntncccc

SEQ ID NO: 2310 - protein, 277 aa, Homo sapiens
  MOD_RES (3)..(36): Variable amino acid
  MOD_RES (61): Variable amino acid
  MOD_RES (102): Variable amino acid
  MOD_RES (178): Variable amino acid
  MOD_RES (187): Variable amino acid
  MOD_RES (207): Variable amino acid
  MOD_RES (218): Variable amino acid
  MOD_RES (220): Variable amino acid
  MOD_RES (225)..(226): Variable amino acid
  MOD_RES (234)..(235): Variable amino acid
  MOD_RES (239)..(240): Variable amino acid
  MOD_RES (257): Variable amino acid
  MOD_RES (273): Variable amino acid
  MOD_RES (275): Variable amino acid
MLXXXXXXXXXXXXXXXXXXXXXXXXXXXXXXXXXXLGSVVLLLCWFFCCLSCAPLRRALXCPCSCLGLSGRSFGWGAPPPFGCFPGLLWGGGLVGFFSPCXPPRAPSCGGLPPLFFFFSLGLLGVGFCCGLRAPAWRLPWPLCWFSCLLPFFPSSPGVWCPPPPFSFFLAWPVVLSXGWLFFVSSXSVFVVFSGSGLGCVVASPFXSPRFSLGLGCXFXPASFXXLCSFLRVXXGAFXXAFFPASLGVGSALVFLXCPPPPCFFFFRGVGPXSXST

SEQ ID NO: 2311 - DNA, 1039 bp, Homo sapiens
  source (1)..(1039)
  CDS (201)..(839)
  modified_base (820)..(829): a, t, c, g, unknown or other
tctagaggatccccttctttgacagaaacaaacagcacagcgtttcacactaatatatacataaacatttatcttgacataaaatcctgcacctacttttgtgagaaatgatatgtctatatccccatttggaatttaattgggctgggggaagggaggtttatattccctgctgaaggatttccagaagaatagacttgatggtgccgctctggatgggtgccgtgctcgaattcgtaatcatggtcatagctgtttcctgtgtgagattgttttccgctcacaattccacacaacatacgagccggatgcataatgtagtatgcctggggtgcctaatgaatgtgctatctcacattaattgtcgttcgctcactgcccgctttccagtcgggatgtctgtcgtgccagctgcattatatgaatcggccatcgcgcggggagaggcgtgtttgtgttttgtgcttcctgggggatatagttttaattctttggtttggtatcagaggtctatttatactaagactgtctcttttttgttgtcgtgtgtgattatcgttgttttacttttatttatatatatttatgttgtagtagagttagttatggtctttgtttttgttcttgttgttgagtatttgatatatgttttgtgtgtcgagtatgtttttgttttgtgtagtattattggtagtatgttagatgtgtattgttttattatattaagttgttatccatctagtggtgcttgtgcatgtttttatatgttgtatattgcttgtttcgttgttgattgtaattggtatcgtgttgatataannnnnnnnnnagtaaactaaaagacaacataaaaaaaaaaaaaaaaaaacaaaaaaaaaaaaaaaagtcttcaccagaaaaaaaaaaaaaaaaaaaaaaagataaaaaaaaaaaacaaaaaaaaaacaaaacaaacaacattattaggaatgtaatgttgcttttctctcccctgcttttccctgccttgtacatcgctctttgtctacaatatctctca

SEQ ID NO: 2312 - protein, 212 aa, Homo sapiens
  MOD_RES (207)..(210): Variable amino acid
MVPLWMGAVLEFVIMVIAVSCVRLFSAHNSTQHTSRMHNVVCLGCLMNVLSHINCRSLTARFPVGMSVVPAALYESAIARGEACLCFVLPGGYSFNSLVWYQRSIYTKTVSFLLSCVIIVVLLLFIYIYVVVELVMVFVFVLVVEYLIYVLCVEYVFVLCSIIGSMLDVYCFIILSCYPSSGACACFYMLYIACFVVDCNWYRVDIXXXXVN

SEQ ID NO: 2313 - DNA, 1279 bp, Homo sapiens
  source (1)..(1279)
  CDS (201)..(1079)
  modified_base (65)..(164): a, t, c, g, unknown or other
  modified_base (180): a, t, c, g, unknown or other
  modified_base (191): a, t, c, g, unknown or other
  modified_base (196): a, t, c, g, unknown or other
  modified_base (211): a, t, c, g, unknown or other
  modified_base (214)..(215): a, t, c, g, unknown or other
  modified_base (231): a, t, c, g, unknown or other
  modified_base (479)..(481): a, t, c, g, unknown or other
  modified_base (483)..(493): a, t, c, g, unknown or other
  modified_base (496)..(503): a, t, c, g, unknown or other
  modified_base (506): a, t, c, g, unknown or other
  modified_base (511): a, t, c, g, unknown or other
  modified_base (747)..(757): a, t, c, g, unknown or other
  modified_base (761): a, t, c, g, unknown or other
  modified_base (763): a, t, c, g, unknown or other
  modified_base (765): a, t, c, g, unknown or other
  modified_base (769): a, t, c, g, unknown or other
  modified_base (856)..(955): a, t, c, g, unknown or other
  modified_base (967): a, t, c, g, unknown or other
  modified_base (980): a, t, c, g, unknown or other
  modified_base (999): a, t, c, g, unknown or other
  modified_base (1014): a, t, c, g, unknown or other
  modified_base (1049)..(1050): a, t, c, g, unknown or other
  modified_base (1056): a, t, c, g, unknown or other
cgcccaccgcagggaggggccggcgttcccccctgggcccattagcatcgcacagaaacaaaacnnnnnnnnnnnnnnnnnnnnnnnnnnnnnnnnnnnnnnnnnnnnnnnnnnnnnnnnnnnnnnnnnnnnnnnnnnnnnnnnnnnnnnnnnnnnnnnnnnnnattttcttaggaaagngcctcgggttnttagntgcgatgccgtgggnggnnacccctccctcttcgnttttttatattacgataagtaccgttgactgcggccccgcgttgtgccacagatgccgggcctctgtcttttcttcattccgtgtgtttctgtcctttccggcctctgtcttttcttcgtcccgcgcatctttgtcctttctggcctctgtctttcctttcctttcctgtcctgtcctgtttgcgttctgcgcatcactgtcctttccagcctctgtcctgtctcccctccccctccctcccttcccnnncnnnnnnnnnnnctnnnnnnnnccnccccnctcccccccccttttctttttttttttttctctttttttttcctttcttttttttttcttcctctttccttttccttctttccttctttccttctttttctctttcttttcctcttccctcctttcctccctcttcccctctctttggtgttcttctttgtgccctttcttctttttttttctgtgtttccttctttttccttctcctttccccttttctccccctttctattttnnnnnnnnnnntttntntntatnttctcccgtcgcttggttttcgctttcggtgccgctccctgtgtttctcgcctccgctctttgtgtcgtaaaaaaaaaaaaaaaagnnnnnnnnnnnnnnnnnnnnnnnnnnnnnnnnnnnnnnnnnnnnnnnnnnnnnnnnnnnnnnnnnnnnnnnnnnnnnnnnnnnnnnnnnnnnnnnnnnnnaattgttttganaggtccctggttnttagccgcgctggggtggnggaaaaaacctctcncattaatagtggggggacttttttacacactactnncatggncatgtaggacagcatcgagctaaatgggaaaatcagcaaagaacatgggatttcaactggactttaggcctccacatacatttacattatagaatattctccccaacaactgcagaagatacgttcttttcatcagcacatgggacattctccaagacagaccatatattatgccacaaaacaagtattggccaggtgcagtggctcacacctgtaatcccag

SEQ ID NO: 2314 - protein, 292 aa, Homo sapiens
  MOD_RES (4)..(5): Variable amino acid
  MOD_RES (11): Variable amino acid
  MOD_RES (93)..(102): Variable amino acid
  MOD_RES (104): Variable amino acid
  MOD_RES (183)..(190): Variable amino acid
  MOD_RES (219)..(252): Variable amino acid
  MOD_RES (256): Variable amino acid
  MOD_RES (260): Variable amino acid
  MOD_RES (267): Variable amino acid
  MOD_RES (272): Variable amino acid
  MOD_RES (283)..(284): Variable amino acid
  MOD_RES (286): Variable amino acid
MPWXXTPPSSXFYITISTVDCGPALCHRCRASVFSSFRVFLSFPASVFSSSRASLSFLASVFPFLSCPVLFAFCASLSFPASVLSPLPLPPFXXXXXXXXXXPXSPPLFFFFFSLFFSFLFFFFLFPFPSFLLSFFFSFFSSSLLSSLFPSLWCSSLCPFFFFFLCFLLFPSPFPFSPPFYFXXXXXXXXSPVAWFSLSVPLPVFLASALCVVKKKKKXXXXXXXXXXXXXXXXXXXXXXXXXXXXXXXXXXIVLXGPWXLAALGWXKKPLXLIVGGLFYTLXXWXCRTASS

SEQ ID NO: 2315 - DNA, 1096 bp, Homo sapiens
  source (1)..(1096)
  CDS (201)..(896)
  modified_base (206)..(306): a, t, c, g, unknown or other
  modified_base (315): a, t, c, g, unknown or other
  modified_base (393): a, t, c, g, unknown or other
  modified_base (1043)..(1096): a, t, c, g, unknown or other
gagcaatcccagggaacatagacaggctgtacctagaaaccacagtggggcaagtttcaaaaagactcacccctacaatatctaggcaggcctacaaaatcttgcagatctttttggatgtttaaggattttgcggtttatttctgtagctaagcttgatgttccttcacgctggctaacgtctgccctctcctaggatcatgaannnnnnnnnnnnnnnnnnnnnnnnnnnnnnnnnnnnnnnnnnnnnnnnnnnnnnnnnnnnnnnnnnnnnnnnnnnnnnnnnnnnnnnnnnnnnnnnnnnnngttttttgnaaggtaccctgtttattatgcttcccttcgtgtggtggaaatatctttgctctctcccggttgggatttctgcagatnacatagcctctggagctgctgagctgtgttttcctgtgggagtgttgcgagtgttggatgtctgcatctgtgtgtggcattgggtgtgtgtgtgcacctgtcagtggagtgtgcttgaaattatgtggctaacccacttcagccctttgtctttctctttttttttttttttttttagtctcccaacctttctggtggaggatttccagtgttggatgtctgcatctttgtgtggcattgtgtgtgtgtgtgtgactataaatggagtctgcttaaaggaatattacttatgcacttcagtgctttctgtttttgagtcttccaacattttgggggcctgtgtttctctgcttgggatgtgggactttctccaggtagtgcttcctgcacaacaatgcagcctcagtagctgctgggctgtgtatttctgtgggagtattttgagtgtaagatgtctgagcgtgtgtgtggcattgtgtgttcaaaaaaagccactcttctaaaaagaagaagagcacaccctgcccaaaagaggtatctcctagtgtgtcattgtcatgaggcccacccacgcatatacactggcagtcctgtccactgggcactttgaattaatcttgaattcagttcccagctgagcaagtgattcnnnnnnnnnnnnnnnnnnnnnnnnnnnnnnnnnnnnnnnnnnnnnnnnnnnnnn

SEQ ID NO: 2316 - protein, 231 aa, Homo sapiens
  MOD_RES (2)..(36): Variable amino acid
  MOD_RES (39): Variable amino acid
  MOD_RES (65): Variable amino acid
MXXXXXXXXXXXXXXXXXXXXXXXXXXXXXXXXXXXFLXGTLFIMLPFVWWKYLCSLPVGISADXIASGAAELCFPVGVLRVLDVCICVWHWVCVCTCQWSVLEIMWLTHFSPLSFSFFFFFFSLPTFLVEDFQCWMSASLCGIVCVCVTINGVCLKEYYLCTSVLSVFESSNILGACVSLLGMWDFLQVVLPAQQCSLSSCWAVYFCGSILSVRCLSVCVALCVQKKPLF

SEQ ID NO: 2317 - DNA, 1285 bp, Homo sapiens
  source (1)..(1285)
  CDS (201)..(1085)
  modified_base (1)..(35): a, t, c, g, unknown or other
  modified_base (67): a, t, c, g, unknown or other
  modified_base (232): a, t, c, g, unknown or other
  modified_base (240): a, t, c, g, unknown or other
  modified_base (247): a, t, c, g, unknown or other
  modified_base (267)..(270): a, t, c, g, unknown or other
  modified_base (364): a, t, c, g, unknown or other
  modified_base (759)..(858): a, t, c, g, unknown or other
  modified_base (870): a, t, c, g, unknown or other
  modified_base (876): a, t, c, g, unknown or other
  modified_base (894): a, t, c, g, unknown or other
  modified_base (1200): a, t, c, g, unknown or other
nnnnnnnnnnnnnnnnnnnnnnnnnnnnnnnnnnncgactgaggtatgattcatcgctccggggtgngaaacttcggagctcaagtggctcagcttaagggagaaggcacagttaacactgcaaagtccgcacagaagtctgcatttgtaatgtggagaacaatagaaattgacagcaccattccttgggtgggtgggggatggagacggggcacccgttggtggtgtgganaggaggangggggcntttttttttctgggcctccnnnntttggggggcgggccctgtctgtgtggtgtggctgtcttcccctctctcttgggtggttgttttcgttggttggtgctttgcgttttttctccnccccgtcttgtcttgtctcttgtcgcgcggcctcgtctctccttcccccccccccttcttttttcctctctcgtctgctctttcctttgctttcggtcttctcctttttggtggttttttttcctcgttcccctgcggcctttggtctctcctcccccggcccttttgctctcttgccttcccgctcttggtcctctcggcgcccttttcctctcggtctctgtggcccttgtgtcctcgtgccctttgttgctttttgtttttgcgctgggggtcgtcttccgcggctttgtctgtggcgttgcgggtggctgcttgttgtggtgggccttgtggcggtgttttgttttgtgtcgtttttgcgtcgctggtggagaaaaaaaaaaaaaaaaaannnnnnnnnnnnnnnnnnnnnnnnnnnnnnnnnnnnnnnnnnnnnnnnnnnnnnnnnnnnnnnnnnnnnnnnnnnnnnnnnnnnnnnnnnnnnnnnnnnngggcctcgattnttatcnctcgctggtggggtggantaagccttggcataaagctaattgtgtatttgtcttacttaaagctaattgtgtacttgtcttacttaaccagctatctgttgatgtgccttaacttcctagggcacatgtcatttgtttatatatttttactaagaaaatacatagttgggaaaagatggtcatctggtcaacccagaatacttgagtagagcattttgttagagccaggaagcctgggtttacatcccagctctgtcacttcctagctgtgtgatcttgggcaaatgacataacttctctgtgactcagtttttccatctgttnaatggggttaatattaacttcttaatatgatcgtgaggattaacgagatgaagacccttagcacagtggctacgacagagcgtgg

SEQ ID NO: 2318 - protein, 294 aa, Homo sapiens
  MOD_RES (11): Variable amino acid
  MOD_RES (14): Variable amino acid
  MOD_RES (16): Variable amino acid
  MOD_RES (23)..(34): Variable amino acid
  MOD_RES (55): Variable amino acid
  MOD_RES (187)..(220): Variable amino acid
  MOD_RES (224): Variable amino acid
  MOD_RES (226): Variable amino acid
  MOD_RES (232): Variable amino acid
METGHPLVVWXGGXGXFFFWASXXWGAGPVCVVWLSSPLSWVVVFVGWCFAFFLXPVLSCLLSRGLVSPSPPPFFFPLSSALSFAFGLLLFGGFFSSFPCGLWSLLPRPFCSLAFPLLVLSAPFSSRSLWPLCPRALCCFLFLRWGSSSAALSVALRVAACCGGPCGGVLFCVVFASLVEKKKKKKXXXXXXXXXXXXXXXXXXXXXXXXXXXXXXXXXXASIXIXRWWGGXSLGIKLIVYLSYLKLIVYLSYLTSYLLMCLNFLGHMSFVYIFLLRKYIVGKRWSSGQPRILE

SEQ ID NO: 2319 - DNA, 1159 bp, Homo sapiens
  source (1)..(1159)
  CDS (201)..(959)
  modified_base (1)..(95): a, t, c, g, unknown or other
  modified_base (99): a, t, c, g, unknown or other
  modified_base (105)..(108): a, t, c, g, unknown or other
  modified_base (120): a, t, c, g, unknown or other
  modified_base (122): a, t, c, g, unknown or other
  modified_base (124): a, t, c, g, unknown or other
  modified_base (134): a, t, c, g, unknown or other
  modified_base (139): a, t, c, g, unknown or other
  modified_base (145)..(146): a, t, c, g, unknown or other
  modified_base (151): a, t, c, g, unknown or other
  modified_base (374): a, t, c, g, unknown or other
  modified_base (399): a, t, c, g, unknown or other
  modified_base (620): a, t, c, g, unknown or other
  modified_base (844)..(943): a, t, c, g, unknown or other
  modified_base (953): a, t, c, g, unknown or other
nnnnnnnnnnnnnnnnnnnnnnnnnnnnnnnnnnnnnnnnnnnnnnnnnnnnnnnnnnnnnnnnnnnnnnnnnnnnnnnnnnnnnnnnnnnnnnngtcnctaaannnngggacttttgantncngaaagtacgngatgngttggnnggatntaatgcacatcggagtctcgccctgttgaccattgctggatgcatttgcatgaactgcgctcattgcaacctccgcctcccaagttcaagccattctcctgcctcagcctcccaagtagctgggactacaggtgagtgccaccatgcccagctaatttttgtatttttagtaaagatggagtttttttttgttggccagggtggtcttgaactcctgacctcnggtgatccaccctcggcctgccctnttgctgggattactggcttgacccctcacgcccggccttcttcccctggttgtttgacctgtgtctctgcttcttccttcccttgcttgttccttgtgcgcccctttcctttgcctcgtccgccgctttggctggtttttcttttgtgtcgctcccccgggttggcctttctttctggtcttctccgggtcttcttctccgtttcttcgttcgcggtttcnctcttttttcttctcttctttccctcctttgttcttccctcgcgggttttctttgcccttcgttcttttcgcttgtgcgttgctctcctgtttcccctgctctcctcccgctgccccgtcccgtttgcgcggtctttgttcgtgtgccttctttgctctccctcccctctcgtgctccgtcctgctcctcctgtctccccaccaaccaaaaacaaaaaaaaaannnnnnnnnnnnnnnnnnnnnnnnnnnnnnnnnnnnnnnnnnnnnnnnnnnnnnnnnnnnnnnnnnnnnnnnnnnnnnnnnnnnnnnnnnnnnnnnnnnncgacttgggntactgaacccatcgtcctgtggtggaaaaaacttgttctcagtcttgactccttcctgttaaagaaaaaaaaagttaatttgggaaatgtgatcaacgaacacgttttataaagcagcagcagccctagttgcttcaaaaatcaacaggtttctcatactgtatgctaaaacggcatactgctgttttcagctgctgaaatcaatg

SEQ ID NO: 2320 - protein, 252 aa, Homo sapiens
  MOD_RES (58): Variable amino acid
  MOD_RES (67): Variable amino acid
  MOD_RES (140): Variable amino acid
  MOD_RES (215)..(248): Variable amino acid
  MOD_RES (251): Variable amino acid
MNCAHCNLRLPSSSHSPASASQVAGTTGECHHAQLIFVFLVKMEFFFVGQGGLELLTXGDPPSACPXAGITGLTPHARPSSPGCLTCVSASSFPCLFLVRPFPLPRPPLWLVFLLCRSPGLAFLSGLLRVFFSVSSFAVXLFFLLFFPSFVLPSRVFFALRSFRLCVALLFPLLSSRCPVPFARSLFVCLLCSPSPLVLRPAPPVSPPTKNKKKXXXXXXXXXXXXXXXXXXXXXXXXXXXXXXXXXXDLXY

SEQ ID NO: 2321 - DNA, 5544 bp, Homo sapiens
  source (1)..(5544)
  CDS (201)..(253)
  CDS (3619)..(3892)
  CDS (4094)..(4567)
  CDS (5114)..(5344)
  modified_base (845)..(854): a, t, c, g, unknown or other
  modified_base (1379)..(1388): a, t, c, g, unknown or other
  modified_base (2216)..(2225): a, t, c, g, unknown or other
  modified_base (3103)..(3112): a, t, c, g, unknown or other
  modified_base (3637)..(3646): a, t, c, g, unknown or other
  modified_base (4543)..(4552): a, t, c, g, unknown or other
  modified_base (5097)..(5106): a, t, c, g, unknown or other
aaaaaaccaccccccccccccgccctgacgctgacgacatcgacactagaggaaagaaaaaaaagaaaaaagctctaggtgctatctgactcttgtcctcagctcttcccgtcgtactcccagcagtagggaaacacagtgatgcgacggttccatcgtcttgaaattccatgcatctataggtgatcgtgccacaatgaatgatcgtgattgttacgcataacgaggagtacctgacggcgtacaccgagtggtaaagttggtgacggcagaatgaatagggatagcaggtacgacttagctgatagtgcacaggggatggtcgttgttataaggtaatggaatcgagtttggcgcagtgtgaatcacatcagtgtgccataacagctagtcggattcagatcacctgatgcccgaggtacactagttcagtactaattggcgttcagagggcagccgggtgactagtgatccagagcttgacatagtaaccggggacgacatagggagcgtagtagactcgagagtctggcagcgcgttcgagctgagttcactagttgggctctgtctagcgagggatgtacacagactttgacggcagcggctctagataacagcgtgtcgaggagagtgaggtgagttatatcgtcctgtgggtggcgggtgggaggtgtggacggtcacaacgaacactgcgtggaagctgtcagctgcgggtagtcacggtgcttggtgatgcgagtgtctgtcattaacagagcagcaatctgtgcagagataggaggccgagcgagctgcgagagagtgtcgtgtggatagagtgtgaagtgagtgatgcgcgctnnnnnnnnnntatacttcttactcctcaagctcagagacaatttaaacagaatactcctctttctttgaattgtcattctgatcacaactggtttagtgacatggctgcaaagtaggtatacagttcttgaaaccctgtcttctttatcttcactttttcactgccaccttgttaagcactgtcattcataaagctttgttcagataattacgtttttaatgtaataacttgcaatattgactggagaagctagctaggtttcctgggttgagtaggggctcagaaagctgtgaaactcactgatttcctgcattaggaattgtttccatcctggatggatagtattgaagatatatgcttaaactattcctaacaccaggatttgtgcatgtgttttcttccccaagaaagctataaacaggaacaattttgctgtaagttttcctgtgtcctctctccctctctgccttccccctctcccaaaactaaagtaaaaggaatgttagctttccacttttctgtgaccagcagacnnnnnnnnnntgcctgcaggtcgactctagaggatccccttgaattgcagaaaatcctatggtcctcacccatagacacaccctcttaccactccgcctccgagacgtattagaatcaagatggggcttggtagcttagtaaagtatatgatccagtatctaccgatcggttatatatatggtaacaacaaaccattcagaggcaaaataaagaaaacaaatccagtcagtatgtcatcaagaataaatgagttagttctggataatgttgtaagaatagaactcctgggactgtgtgacgaagattactcagctcacggacctcaagactcgggaagttccagacgcctggcatctgtgtatggttagagtcagatgagggcttggggcgtgactcacaacgtaggagggtaactaagtggggttgggaatgtgacgagtgtcgctactcacggtattgcataattatgtgtgatgtgatgggggtatgaattgtcggagcagcgacgatagtggtgcagatgagcataatgattagaagggggagtgacactatcgataagatgcaggagcagcaggagctcaagagagagtcacagtagctgcgaacagcgagataagtaataagaggagtgagttgcagtcaggagtgactagtattagggagagataacggcagaccgtggaagctagagaggaataaggagtcagtaatcggtaaggatcgtagggagagccagtctagtagcacgcagtagtcagtggtggtagaagagctagcagatagtaggtgagcggtcaggcaatgagcgaggcaatagtgaggtgagtgaggaannnnnnnnnngagaagaaaaacgatcaccccacccccaggcccgactgaatgcggcaggacgacactagaggagcacacaggaaagaagaaaaaactattgaacacacgcctagtcacagcccagatagcataccccctccaacacttactagaagtaggatgcggcttcgtacggtttatagaatatagacgatatataaatatctgttagatatacagtagctacaaacggttgcattacggattacagcaatcatttcctgtcacgatagtcatcaaaagtacatgtacctggtctgtgtgatgttattatagatagaacccctgatactataacaatagactgagttagctacacgtgatcacaggctgatgagggcaacaagcgtggcatcgctctctgcttcggaacagatgaggactgtagtaatgcacacacagcatggcagcagacgtgacagtgaagtcggaatgctcgaagaggccacaacactggggactacgtgggtacgctaggatacagtatagcgttcgcatctcttggcaacaggaccgtggtcagaagtaacggagatattggtggtacggtgacgtgaaacacgtggcgcgatcatcgaaagtgtctggtactagtagagattaatgttcgccatctgaacacacacgaactgacggctgttatgagaacatgagatgcaataaagagacgaattgtgtagcaaacacaatagtgcgagcacaagcttacactaatgagagaacaagcacagtatcgacgataccaaacgaccaggctatcgcggccgagtcaggtaaggagtgggcgagcagcatgcaaacggtgacacatgatgtaagtgaggacaggagtagatagttacagcatnnnnnnnnnnattctgtttgtgctgagttatagttttgcagcctctataccaaattttgaaaccttatagtattttgcagtgataagtatgaaattgcttgattaataaatgcaagcaaaaatgtatgctggcaactcttaagacatttctaatcttactgtaccagtaagttttaaaaattaaagtcacacaaacagaatgttccacagtttttactttttcccttaaaaaaattaagtacttattttttaggccacttaattagagttcttttaatagacattgcacatataacacatatatagtcacacacacacactaacacacacacacacaaggaaaaacagaagaagacccagtagttataagatttttttttccttctaatttaccaattaggttattggacttattaaagaatagggctaggaaaacagtctctatgatctaataagcaagtataagtgaaagacaaagacagattttgagaggtacttattcacttctaattacaggggttccataaggaaaaannnnnnnnnntgttgtggcggtggcgtgtgccgtcctccttcttctcttttccgcccgccccctccccccccccccccccgcccccccctcccccccccccccggttacgaggacccccacccgccaagagagagagacattcagcgcaacccctcctctcctcgtccgctccacccccctgccctgtgtcgagagcttgcgccttcagtatccgcgcctcctatctctgttcttgcgccccggggtcatgtgttggtaggctgcctgtatggcgcttccggtgttcctttttctcctttcactggctcttcgggtggcgtcttttcgctctcgtggccgcggctgtgtgggttgtttgctgtatgttgtgtgctggtgtttgtgttttgtgtctggtgtgtgttggtcgtgtttgtgtgcttctgtcctttgtgctctgtcctcgtttcccgttagtgcctgccacgcgtcggtgttgtgtcccttacctggctgtcctgtgtgcccccctctcgtggtgttagttcactgttgttcctccgttctcttctgcagctggactgtgtttttacgcttcccgtgcgcgtcgtcttcttgtgttgtgggcctcagtggtgtcgcgctttggtttttgtctggttcgtgttcttgttgttgtgtgctgtcggtccttcctgtctgtggtgggtgtttagctgtcctccatggtcgtttgtgctcttttggctggtgtttgtcacttgtagcttggtgttctctgttgcgccgcgtggtcgtgtgttgttcttctgtgcttccgctgtgtgtctgtccgtcttcgcgtctgtccttttgcctgtggtactgtttcgcaggttggtatctggtgctgtggtcctttcagctatttcacttccgcttcgtgtnnnnnnnnnngattggatcatggaggtggtttccctcatgctgttggcatgatactaagtgagttttcacatctgatggttttatgagtctttggtagctcctcttgcatcattcttcttcctgccatcttgagaagaagaagaagactgcttcatcttctgccataatcttaaatttcctgaggcctcctcagtcatgctgaactgtgagtaaattaaacaactttcctttataaattacccagccttgggtatgtctttattagcagcctggaaatagactaatacaccatccttacataccattgacagttatagcatgatcacatatcagtgttttaatctaccctttatattgataagcacatacatttctatcaacaatatttaaaaaaaagacattaaacaaaataacccaggcctatgttttgcttacgtcagtatgagctccatagtaacctacaatgttgttatcctcactgactaacatcttttctgtcttctttcttgatatttctctgcatgacttccactcatctcactgcatttatttannnnnnnnnntatttagtgctggttggggaaggtggcggtcatttgctgcgtgccgttcctctcgttcgtcgccctcgcgccggccggccgtgcgccggcaccactgcggtgcgtgttccctcaccgcgctccccccccccctgagtttggtctagtgaggagcgcgcgcgcgcgacggcgggaggaggggagaggggatgttagatgctcccgccgcgtcggtgccttgctgcatctcgtgtactaacggcgtacgcgccctcagcgatccgtacgacgtcgacgcgcggttctagagcgtgatcccctaccttcgggtgtcatgatgctgccgcgttgtcgatgtgggacgacgcgtgtgctcgatgttggtgacggagtggtgcgtgcggcatgcgtgaggtgctcgttgttgatggtgacgtgttcgagaatgcatcgtggtct

SEQ ID NO: 2322 - protein, 343 aa, Homo sapiens
  MOD_RES (24)..(27): Variable amino acid
  MOD_RES (259)..(262): Variable amino acid
MIVIVTHNEEYLTAYTEWGSIRKXXXXCCGGGVCRPPSSLFRPPPPPPPPRPPLPPPPGYEDPHPPRERDIQRNPSSPRPLHPPALCRELAPSVSAPPISVLAPRGHVLCLPRVGVVSLTWLSCVPPSRGVSSLLFLRSLLQLDCVFTLPVRVVFLCCGPQWCRALVFVWFVFLLLCAVGPSCLWWVFSCPPWSFVLFWLVFVTCSLVFSVAPRGRVLFFCASAVCLSVFASVLLPVVLFRRLVSGAVVLSAISLPLRXXXXDWIMECWLGKVAVICCVPFLSFVALAPAGRAPAPLRCVFPHRAPPPPEFGLVRSARARRREEGRGDVRCSRRVGALLHLVY

SEQ ID NO: 2323 - DNA, 1763 bp, Homo sapiens
  source (1)..(1763)
  CDS (201)..(503)
  CDS (691)..(1563)
  modified_base (569)..(568): a, t, c, g, unknown or other
  modified_base (1025): a, t, c, g, unknown or other
accgggctgcatccgatgcaagtgtgtcgctgtcgacggtgaccctatagtcgagggacctaataacttcgtatagcatacattatacgaagttatattaagggttccggatcaattctcatgtttgacagcttatcatcgataagctttaatgcggtagtttatcacagttaaattgctaacgcagtcaggcaccgtgtatgaaatctaacaatgcgctcatcgtcatcctcggcaccgtcaccctggatgctgtaggcataggcttggttatgccggtactgccgggcctcttgcgggatatcgtccattccgacagcatcgccagtcactatggcgtgctgctagcgctatatgcgttgatgcaatttctatgcgcacccgttctcggagcactgtccgaccgctttggccgccgcccagtcctgctcgcttcgctacttggagccactatcgactacgcgatcatggcgaccacacccgtcctaaggaaatacccactagtcaattcaccatcttgttgagaaataaaagacagtgccgatgagggtatcctaagagtggacaannnnnnnnnnnnnnnnnnnnnnnnnnnnnnnnnnnnnnnnnnnnnnnnnnnnnnnnnnnnnnnnnnnnnnnnnnnnnnnnnnnnnnnnnnnnnnnnnnnngtgctcgtttcgctgtccgtagtgcgttgtctgttctcgtttgcgtgttgtgttgcggttttcatctgcgtcttgttccgctgtgtctccgttttcggttcgtctccgtgtgcgttttggtttcggttcgcgtccgtttcctccgcgtgtggttcgcgatcggttcggtttcgtttctttgcgcttcattcgctctgtcgtgcttttgcgctgctgttcttatgcgttgcgattggtgtccgtgtcgtgttccgttcgtttcctgttcggtctggttcagtttccgttgcgttcttcttttgttccgttccgatcgcgttcgtgtcctctcctttccgtcccgtctgctctggttcngttcgtgtcatgtcggttcgtttgctgtctgtcgatcgcttcgggtcgggtccgttcttgcgtttcttgcttctcgttcgttcgttttgtccgtttgtttcgtttcatctcttggttcctccgtttccgttcctccgtctcttcgttcgttcgtctatctcttggtctttgtagttgtttggtcctgcgttccgttcgttcgttcgttcgttttttttcttcttctttgtttcgcgttattatcgttcgtcgtttgtgtggtctctgttcttcggtcggtgtttgttcgttgttccttcgtcgttctttgtgttttcgtgtgcgttcttctgtcttttttggtttgcgtccttccttgttgttcggtccttcgtgcgtcgttgttcttcgttgctttttcgtctttctgcctcgttcgttcttcgttctgtctttgtttccttcgtgttcgtttcttccttgctttttcgttcttcttgtccttggtcctcgttcttccgttcggtctgtcgttcttccttcgtttgtggtcggttgatcgttcgttgctttgtctgttcgtggttgtttctcttttcgttgcttctttcttggtccgttcgatcgttcggtcgttcggtcgcttctttcgtcggttgtgtcattgttgtgtttgttccgtcctgtcgttgcgttgtcctttgtgctctttctccgtggtgttgggtgctttctgcttttgtggttttttcgttttct

SEQ ID NO: 2324 - protein, 391 aa, Homo sapiens
  MOD_RES (213): Variable amino acid
MKSNNALIVILGTVTLDAVGIGLVMPVLPGLLRDIVHSDSIASHYGVLLALYALMQFLCAPVLGALSDRFGRRPVLLASLLGATIDYAIMATTPVLRKYPLCVVCSRLRVVLRFSSASCSAVSPFSVRLRVRFGFGSRPFPPRVVRDRFGFVSLRFIRSVVLLRCCSYALRLVSVSCSVRFLFGLVQFPLRSSFVPFRSRSCPLLSVPSALVXFVSCRFVCCLSIASGRVRSCVSCFSFVRFVRLFRFISWFLRFRSSVSSFVRLSLGLCSCLVLRSVRSFVRFFSSSLFRVIIVRRLCGLCSSVGVCSLFLRRSLCFRVRSSVFFGLRPSLLFGPSCVVVLRCFFVFLPRSFFVLSLFPSCSFLPCFFVLLVLGPRSSVRSVVLPSFVVG

SEQ ID NO: 2325 - DNA, 1546 bp, Homo sapiens
  source (1)..(1546)
  CDS (201)..(1346)
  modified_base (6): a, t, c, g, unknown or other
  modified_base (458): a, t, c, g, unknown or other
  modified_base (551): a, t, c, g, unknown or other
  modified_base (608): a, t, c, g, unknown or other
  modified_base (665): a, t, c, g, unknown or other
  modified_base (745): a, t, c, g, unknown or other
  modified_base (845): a, t, c, g, unknown or other
  modified_base (855): a, t, c, g, unknown or other
  modified_base (927): a, t, c, g, unknown or other
  modified_base (932): a, t, c, g, unknown or other
  modified_base (997): a, t, c, g, unknown or other
  modified_base (1002): a, t, c, g, unknown or other
  modified_base (1033): a, t, c, g, unknown or other
  modified_base (1090): a, t, c, g, unknown or other
  modified_base (1100): a, t, c, g, unknown or other
  modified_base (1110): a, t, c, g, unknown or other
  modified_base (1112): a, t, c, g, unknown or other
  modified_base (1122): a, t, c, g, unknown or other
  modified_base (1148): a, t, c, g, unknown or other
  modified_base (1150): a, t, c, g, unknown or other
  modified_base (1160): a, t, c, g, unknown or other
  modified_base (1177): a, t, c, g, unknown or other
  modified_base (1180): a, t, c, g, unknown or other
  modified_base (1182)..(1183): a, t, c, g, unknown or other
  modified_base (1185)..(1193): a, t, c, g, unknown or other
  modified_base (1196)..(1197): a, t, c, g, unknown or other
  modified_base (1199): a, t, c, g, unknown or other
  modified_base (1206): a, t, c, g, unknown or other
  modified_base (1208): a, t, c, g, unknown or other
  modified_base (1212): a, t, c, g, unknown or other
  modified_base (1216): a, t, c, g, unknown or other
  modified_base (1221): a, t, c, g, unknown or other
  modified_base (1244)..(1343): a, t, c, g, unknown or other
tttctntgcggtctctctttgcgtcgtgggtctccctctctcgtgtgtctctcgtcgcccgctcttgtgttccctttttgtctctcgccctgtcctgtttgttgtcgttgtgcggccgctctcctccggcttgccttcccgcctgtcgtccgtgttcggttccgctcttgccttgcccggttgttctcgtttttccggttttgtgccgtggggccgccttttctccgttcttccctctccgttttgtgtttggtgtgccgtccgtggtcttgttccgtgttcctcgcgtgttgtttctctccttggtccgtctgcgtgtgtttcctcccggtgttgtcttcgctttcccgtctggctcttctgttttcccgtcccgctcggtcttcgtgtgcttttccgtctcgcgcctgtccggttttgttcttcccctgcgcgcgtgtcgccgtggtttctcgcgnttccgtgggtcctcgtcctcctccttcctgtgtgttctgttcgtccccgttcgcgttctcggtgcgggccgccgcgcccgtgtttgcgtcccnttttcccgccgctctttttctcctcgttctcgtgcgcgttcccctccctcgtgttcnttgttgtgcgcgggtgtgtgtccccgtctccgcgctgtctccttttctcgctcttgntttccgcgtgggtccgttcgtgtcgtggctctgtgcggtgcccgcctcgccgctccctcgttcgttctcggtgctcttcngcccgctggtgtcctcctttggctctgcttggttgcgtgtgcgcgtcctccgctctcgccggcttgtgtgtctgcgcccttgcgtgcctcttcgtgcgcntgcgttttcntgtgcgctcgcgtgcgtgcgttcgtgttgccgcgtctcgtgtccgtgcgcgcgtcgcgcgcctgtctcgctngtgtncgcgtcgtcgtgcgtgtcgcttcgcgtttcgggcttgcgtctggctccgttcctctcgccgttgntgtgntgtgtgtgtgggcgcggggcgcgtcgggctnttctcttcgtgtctttctttctcccccgcgcctcgtctgtttgtgtcctgtcctcgnggccgcgggngtggccgtcntntatcttcctntattttggcgttgcgtcgcgtcgcgntntcgtgtgtgncgcccagtatttgtcgnttncnntnnnnnnnnntcnntngggggcntntgtntggncttcngtgctgtatttagccgggggagnnnnnnnnnnnnnnnnnnnnnnnnnnnnnnnnnnnnnnnnnnnnnnnnnnnnnnnnnnnnnnnnnnnnnnnnnnnnnnnnnnnnnnnnnnnnnnnnnnnntaggtcatccaggaggtctagtcccacaaaacatgttataaccagcaggtggttggttcccagtgtaccaaccggtgggccaagcctttccggcgccaagaaaataaagtgggactttgtttccggtggtgcaatcatccaaggtcaacagggaaggccgctccccctttatgaaaattgccgctgtgcatgtgatcaacagg

SEQ ID NO: 2326 - protein, 381 aa, Homo sapiens
  MOD_RES (86): Variable amino acid
  MOD_RES (117): Variable amino acid
  MOD_RES (136): Variable amino acid
  MOD_RES (155): Variable amino acid
  MOD_RES (182): Variable amino acid
  MOD_RES (215): Variable amino acid
  MOD_RES (219): Variable amino acid
  MOD_RES (243)..(244): Variable amino acid
  MOD_RES (266): Variable amino acid
  MOD_RES (268): Variable amino acid
  MOD_RES (278): Variable amino acid
  MOD_RES (297): Variable amino acid
  MOD_RES (300): Variable amino acid
  MOD_RES (304): Variable amino acid
  MOD_RES (308): Variable amino acid
  MOD_RES (316)..(317): Variable amino acid
  MOD_RES (320): Variable amino acid
  MOD_RES (326)..(333): Variable amino acid
  MOD_RES (338)..(339): Variable amino acid
  MOD_RES (341): Variable amino acid
  MOD_RES (348)..(381): Variable amino acid
LCRGAAFSPFFPLRFVFGVPSVVLFRVPRVLFLSLVRLRVFPPGVVFAFPSGSSVFPSRSVFVCFSVSRLSGFVLPLRACRRGFSXFRGSSSSSFLCVLFVPVRVLGAGRRARVCVXFSRRSFSPRSRARSPPSCXLLCAGVCPRLRAVSFSRSXFPRGSVRVVALCGARLAAPSFVLGALXPAGVLLWLCLVACARPPLSPACVSAPLRASSCXCVFXCARVRAFVLPRLVSVRASRACLAXXRVVVRVASRFGLASGSVPLAVXVXCVWARGASGXSLRVFLSPPRLVCLCPVLXAAXVAVXYLPXFWRCVASXXRVXRPVFVXXXXXXXXGGXCXXFXAVFSRGXXXXXXXXXXXXXXXXXXXXXXXXXXXXXXXXXX

SEQ ID NO: 2327 - DNA, 1204 bp, Homo sapiens
  source (1)..(1204)
  CDS (201)..(1004)
acatgttttcaatgtgttttttctatttagatatgtttaaatacacaaacatatacattgtcttacaattgcctgcagtattcagtgcagtaacctgccattggctgtatcatataccctagatgtgtagcaggagccattggctgtatcatataccctagatgtgtagtaggagccattggctatatcatataccctagatgtgtagcaggaccattggctgtatcatataccctagatgtgtagtaggacgcattggctatatcatataccctagatgtgtagtagggaccattggctatatcatataccctagatgtgtagtaggacgcattggctatatcatataccctaggtgtgtagcaggacgcattggctatatcatataccctagatgtgtagcaggagccattggctatatcatataccctagatgtgtagcaggagccattggctatatcatataccctagatgtgtagcaggagccattggctgtatcatataccttagatgtgtagcaggagccattggctgtatcatataccctagatgtgtagtaggagccattggctataccatatactctagatgtgtagtaggagccattggctatatcatataccctaggtgtgtagtaggagccattggctatatcatataccctagatgtgtagtaggagccattggctatatcatataccctaggtgtgtagtaggagcaattggctacatcgtataccctagatgtgtagcaggagcaattggctatatcatataccttagatgtgtagcaggagccattggcagtatcatataccctagatgtgtagtaggagccattggctatatcatataccctaggtgtgtagtaggagcaattggctatatcatataccctaggtatgtagtaggagccattggctgtatcatataccctaggtgtgtagtaggagccattggctatatcatataccctaagtgtgtagtaggctataccatgtaggtttgtgtaagtgcattctaggatgttcacacaaagacaaaatcaactaacaacacatttttcagaacacatccctgtcactaagtgacacaagactctatttgtttcctcctttatacaattattctttataacccttactgcaatgtattttaaggagagtaaagattttcttttccaattcattatgtatttcttat

SEQ ID NO: 2328 - protein, 267 aa, Homo sapiens
MCSRTIGCIIYPRCVVGRIGYIIYPRCVVGTIGYIIYPRCVVGRIGYIIYPRCVAGRIGYIIYPRCVAGAIGYIIYPRCVAGAIGYIIYPRCVAGAIGCIIYLRCVAGAIGCIIYPRCVVGAIGYTIYSRCVVGAIGYIIYPRCVVGAIGYIIYPRCVVGAIGYIIYPRCVVGAIGYIVYPRCVAGAIGYIIYLRCVAGAIGSIIYPRCVVGAIGYIIYPRCVVGAIGYIIYPRYVVGAIGCIIYPRCVVGAIGYIIYPKCVVGYTM

SEQ ID NO: 2329 - DNA, 2176 bp, Homo sapiens
  source (1)..(2176)
  CDS (201)..(1976)
  modified_base (207)..(306): a, t, c, g, unknown or other
  modified_base (1632)..(1731): a, t, c, g, unknown or other
gaatggagaattgattggaatggaatggaacagagaatgcagaatggaatggaatggaatggagaatggagtagatagatggagattgactgtatgagagtgacaaaatgagatgatgatgagatgtatgatgatgagatgtatgatgatgagatgtatgtatgaggcatgaatgagaatggaagggaagggaatggagaatggcannnnnnnnnnnnnnnnnnnnnnnnnnnnnnnnnnnnnnnnnnnnnnnnnnnnnnnnnnnnnnnnnnnnnnnnnnnnnnnnnnnnnnnnnnnnnnnnnnnnccgggcagtgcgaggcagtggcgcatggaagggcgtggggcagggggggggggggaggggcgggcggtgagtggcggggcgacgatgggaggagtgccagggcggagcgattgccagtcagcgaatgggcagtgcaggagatgcgcatggcatgcacgtgtcgatgcgggggtagcgatgtggtggggagttggcgatgtggggccgagtgcgggtggcatttgtgcgcagttgcgcagttgttgctgaggtgccaggtggcaggtgccgagtttggggcccatgtggccattgccattggtgcgattccagtgctgccattttcattccactgctgcggtgtgccagttgccagtggtgcgtccatttgccaagtccattccatttctcccataacgcatgcctcccagttcgcattgccatttgtggccgctgcatgtggtattgcaccattggcagtgtgcattcgcattggtggcggtgttgccagtgcattgtcgcattgccattggtgcgtccgcatgtttcgcatttcccattctgccctgtccattgccatgtgcccattgccattctcaattcccattccattctccttaccaacctccattccattcctttgccatcctgccattccatttcattccactatccattccattccatcctccattccattccattcttttccattttcaagtcctttccattctcccttccattctattgtccattccattctccacaccattccattctccttaccaacctccattccattacattccattctccattccattatattcactactgcattcaattccatattctattcctttctccattccattctccattccattccattctccataccatcctccattccattacactgcattccattctccattctattttattcaccacggcattccattacattttccattccattctattctccattccattccatattctattcctttctccattccattcccctttccattccattctccattccattccattttctattccactccattcaccactgcattccattccagtctccattccattccattctccattgcatttcattctccactgcattcctttccattccatttcccactgaattccattctccattccattcccttctattctccatttcatttcactctcccttccagttcaatctccattcccttccattctccattccactccacattcccttccattctccattccattctattgtctattccattccatttcaattcattgttcactccattcccttccccnnnnnnnnnnnnnnnnnnnnnnnnnnnnnnnnnnnnnnnnnnnnnnnnnnnnnnnnnnnnnnnnnnnnnnnnnnnnnnnnnnnnnnnnnnnnnnnnnnnnaagaagaaagagacagaagcacagcacaaccagagagacagaaaaagagagggagacagagagaggaggagaggggcgaggggagaagagagggtagcggcaagagtgacgagagtacggcaggagcgacagatagaccaggaaaagaaagagggagcgcaagtgacaagagagatgccgggccggcagaaacggatggaagagggctccagagcgagagcagaggaagaaaacaaataagatagagatgccgtccagcacaaaagataaaacagataaaaagaagacatcaatcgtgagagagaggagcgtgatcttagaaaaagactgtaattttcagagacttgatgataggagagtaaaaggatggcaggccactcagaggcaaaaaataggctgagtgctgacaaaagttgaataggcacccggccattaaccacttatt

SEQ ID NO: 2330 - protein, 591 aa, Homo sapiens
  MOD_RES (3)..(36): Variable amino acid
  MOD_RES (478)..(511): Variable amino acid
MAXXXXXXXXXXXXXXXXXXXXXXXXXXXXXXXXXXGQCEAVAHGRAWGRGGGGGAGGEWRGDDGRSARAERLPVSEWAVQEMRMACTCRCGGSDVVGSWRCGAECGWHLCAVAQLLLRCQVAGAEFGAHVAIAIGAIPVLPFSFHCCGVPVASGASICQVHSISPITHASQFALPFVAAACGIAPLAVCIRIGGGVASALSHCHWCVRMFRISHSALSIAMCPLPFSIPIPFSLPTSIPFLCHPAIPFHSTIHSIPSSIPFHSFPFSSPFHSPFHSIVHSILHTIPFSLPTSIPLHSILHSIIFTTAFNSIFYSFLHSILHSIPFSIPSSIPLHCIPFSILFYSPRHSITFSIPFYSPFHSIFYSFLHSIPLSIPFSIPFHFLFHSIHHCIPFQSPFHSILHCISFSTAFLSIPFPTEFHSPFHSLLFSISFHSPFQFNLHSLPFSIPLHIPFHSPFHSIVYSIPFQFIVHSIPFPXXXXXXXXXXXXXXXXXXXXXXXXXXXXXXXXXXEERDRSTAQPERQKKRGRQREEERGEGRREGSGKSDESTAGATDRPGKERGSASDKRDAGPAETDGRGLQSESRGRKQIR

SEQ ID NO: 2331 - DNA, 1327 bp, Homo sapiens
  source (1)..(1327)
  CDS (201)..(1127)
ccatggcctcccctccctccagctcacccagccccagtgtgcatcacatttcctgatgctttcaaccttggatcagcccagccatccttcttctctgttcctacagctggggctgttgagtgaggtttgggaagaagctttcttgtgtgcacggactctcgtcatttctcccggtttccagcaccctggaatcctcttctatgtcctttctcagctcccactcatttccacactggtggaggcagacctcgggtgtgatcctcacggcctccctgctctgctcttccttggtaggtgggtgtcccggcaggcggctttacttcctgctctgctcttccttggtaggtgggtgtcccggcaggcggctttacttcctgctgcacagagtcaagggtgtgagtgtggccgcctcagcttggccctcccttgtttattccactcccctttgctttttcttctcacgtgtcagaggcacgtatggcctggatgtgtgtgtgtggtgtgggtgtgtatatgtggcggggcgtggggaaatgaggatgtatttgggtgtggtgtatgtgtatgtgggtattttttggggtgtatggtgtgtatgcgtttgtgtggggcatgtttatggtgtgagtgtgagggaatgtgtgtggtgtgtgtgtatatatgttgggggaggtgggtgtcatgtgatgtgtgtgactgtggtgtgtttgtatatgtgggactatgagggattgggatgtgtgtattttgtgtgtgggtggagatgtgggtgtggtatgcatggtgtgtgtggctatgtgagggggatgtgtgtgtgtggtatgtgtatgttgggggatgtttgtggtgtgtatgtacatgtggagggtatggggtatgtgtgtttgtgggaggtgcgtggggggatatgtgtgggtgtgtgtgtgggtgtggcgtgtgggggtgtgtgggctgcatatgtgggggtgtgtgtatgtgtgtgtgttggagtgtgtgtgtggtgtggggaatgtgtggtgtgtgtgtggtgtgtgtgtcggggggtgggtgatgtgtgtttgtgggctctttcagccaaggctggggcagttagtgcagtcagctggtgtgttgtgtgtggggtgtgatgtgtgtgtgatctgtggtgtgtgatgtgggtgcgtggtgtgtggtgtgtgtctggtatgtgtgtggtgtgggtgtgtgggctctgtcagccaaggctggggcaattagtgcagtcagctggtgtgtgtgtggtgtgtctgatgtgtgtgtggtatctgtgtggtgtgtgtgtgatgtgtgtgatgtatgtgtgttgtgt

SEQ ID NO: 2332 - protein, 308 aa, Homo sapiens
MSFLSSHSFPHWWRQTSGVILTASLLCSSLVGGCPGRRLYFLLCSSLVGGCPGRRLYFLLHRVKGVSVAASAWPSLVYSTPLCFFFSRVRGTYGLDVCVWCGCVYVAGRGEMRMYLGVVYVYVGIFWGVWCVCVCVGHVYGVSVRECVWCVCIYVGGGGCHVMCVTVVCLYMWDYEGLGCVYFVCGWRCGCGMHGVCGYVRGMCVCGMCMLGDVCGVYVHVEGMGYVCLWEVRGGICVGVCVGVACGGVWAAYVGVCVCVCVGVCVWCGECVVCVWCVCRGVGDVCLWALSAKAGAVSAVSWCVVCGV

SEQ ID NO: 2333 - DNA, 2416 bp, Homo sapiens
  source (1)..(2416)
  CDS (201)..(2216)
  modified_base (330)..(1246): a, t, c, g, unknown or other
  modified_base (1704): a, t, c, g, unknown or other
  modified_base (1712): a, t, c, g, unknown or other
  modified_base (1716)..(1717): a, t, c, g, unknown or other
  modified_base (1724): a, t, c, g, unknown or other
  modified_base (1803): a, t, c, g, unknown or other
  modified_base (1814): a, t, c, g, unknown or other
  modified_base (1836): a, t, c, g, unknown or other
  modified_base (1838): a, t, c, g, unknown or other
  modified_base (1840): a, t, c, g, unknown or other
  modified_base (1842)..(1843): a, t, c, g, unknown or other
  modified_base (1847)..(1851): a, t, c, g, unknown or other
  modified_base (1855): a, t, c, g, unknown or other
  modified_base (1859)..(1864): a, t, c, g, unknown or other
  modified_base (1869)..(1870): a, t, c, g, unknown or other
  modified_base (1873): a, t, c, g, unknown or other
gtgaaaaaatattttaaatcctcttttttattttagagtgatctttgaagatgattaccttattttacaaacagacgtttctaataattgaataccattaaatatctgtccaaaaatttccttttgacctcaaaattacaactaatatatagtgtttttgtttcttcctaacgacaaggaaatctgatgtcattgtgtaaatgatgcagaagaaatgttttgcatgggcaaaagtgcactatctcaaggatttggataaacttttatgtcattgtccttgtctgtggcacagtgtggggcgggggagggggtcctctgctctgatccacnnnnnnnnnnnnnnnnnnnnnnnnnnnnnnnnnnnnnnnnnnnnnnnnnnnnnnnnnnnnnnnnnnnnnnnnnnnnnnnnnnnnnnnnnnnnnnnnnnnnnnnnnnnnnnnnnnnnnnnnnnnnnnnnnnnnnnnnnnnnnnnnnnnnnnnnnnnnnnnnnnnnnnnnnnnnnnnnnnnnnnnnnnnnnnnnnnnnnnnnnnnnnnnnnnnnnnnnnnnnnnnnnnnnnnnnnnnnnnnnnnnnnnnnnnnnnnnnnnnnnnnnnnnnnnnnnnnnnnnnnnnnnnnnnnnnnnnnnnnnnnnnnnnnnnnnnnnnnnnnnnnnnnnnnnnnnnnnnnnnnnnnnnnnnnnnnnnnnnnnnnnnnnnnnnnnnnnnnnnnnnnnnnnnnnnnnnnnnnnnnnnnnnnnnnnnnnnnnnnnnnnnnnnnnnnnnnnnnnnnnnnnnnnnnnnnnnnnnnnnnnnnnnnnnnnnnnnnnnnnnnnnnnnnnnnnnnnnnnnnnnnnnnnnnnnnnnnnnnnnnnnnnnnnnnnnnnnnnnnnnnnnnnnnnnnnnnnnnnnnnnnnnnnnnnnnnnnnnnnnnnnnnnnnnnnnnnnnnnnnnnnnnnnnnnnnnnnnnnnnnnnnnnnnnnnnnnnnnnnnnnnnnnnnnnnnnnnnnnnnnnnnnnnnnnnnnnnnnnnnnnnnnnnnnnnnnnnnnnnnnnnnnnnnnnnnnnnnnnnnnnnnnnnnnnnnnnnnnnnnnnnnnnnnnnnnnnnnnnnnnnnnnnnnnnnnnnnnnnnnnnnnnnnnnnnnnnnnnnnnnnnnnnnnnnnnnnnnnnnnnnnnnnnnnnnnnnnnnnnnnnnnnnnnnnnnnnnnnnnnnnnnnnnnnnnnnnnnnnnnnnnnnnnnnnnnnnnnnnnnnnnnnnnnnnnnnnnnntcctgtgctgtccctcccctgcttcctctctctccctgctctggctctctcccctcggtcctctttcccctcttccttccctctctccctcctttcgctccttcgtctctttgctcgcttcggttcctttttcttctttccctcctctgtttctcttctgttcctccttttcgccgcttcctgtctgcgttgcctgccctcttccttctgctctctccttgccgtctccgttcctctgggtctccgccctctctcctcttctctttcctctctttttcgcctgtcctccctttctctcctttctttccctcctccttctcttcttgccttccccggttcctttcgctctctgttcctccttttctctccttctgttctttctcttcttccccctggggttcctgcctgttttcctttccttctccgcccttttctccttttgtgccctctttgttccncttgtgcncggnntggtagngtgcttggtttagggtgccttccttcccgtcgttccttccttgtccttggcttgctttcggtttgttgtgtgttttttntttggtttttntgtttgtttttttggttttttntntntnngttnnnnntggnatgnnnnnntgggnntgnaaaatggtgtggcggaactggacagacccctactccaccccacagggatgagcccatccttggaggagcccagccctggaagtgccagtcactcctgagagtaaatcaagatgcaggacctcttactgcccatgacccaggtctcctttcaaacctaccaatcaggatgctagaagtgcatgatgggcagagcaagccaggggttatgctaatgagctccctcccctggatgggatcctgtgggtttccttcttcccatgggcacccccaacctggcctggccaacagacactgcaaacaagcgcccttacctgcagcagctcaggaaaactcctctatttgaaagctgagctctgtctgtattagactaagtttatggaatggaaaagggtagatggtcatttcagagtgactttggggggaaaaaactcaggatattgtaattaaagttggttataccaagaaagtcaaaagttctggccttcattacccttaagtgatgacgcttgtgtgaattgcatcccccccacctcaaaattcatg

SEQ ID NO: 2334 - protein, 671 aa, Homo sapiens
  MOD_RES (44)..(349): Variable amino acid
  MOD_RES (502): Variable amino acid
  MOD_RES (504): Variable amino acid
  MOD_RES (506): Variable amino acid
  MOD_RES (508): Variable amino acid
  MOD_RES (535): Variable amino acid
  MOD_RES (538): Variable amino acid
  MOD_RES (546)..(555): Variable amino acid
  MOD_RES (557)..(558): Variable amino acid
MMQKKCFAWAKVHYLKDLDKLLCHCPCLWHSVGRGRGSSALIHXXXXXXXXXXXXXXXXXXXXXXXXXXXXXXXXXXXXXXXXXXXXXXXXXXXXXXXXXXXXXXXXXXXXXXXXXXXXXXXXXXXXXXXXXXXXXXXXXXXXXXXXXXXXXXXXXXXXXXXXXXXXXXXXXXXXXXXXXXXXXXXXXXXXXXXXXXXXXXXXXXXXXXXXXXXXXXXXXXXXXXXXXXXXXXXXXXXXXXXXXXXXXXXXXXXXXXXXXXXXXXXXXXXXXXXXXXXXXXXXXXXXXXXXXXXXXXXXXXXXXXXXXXXXXXXXXXXXXXXXXXXXXXXXXXXXXXXXXXXXXXXXXXPVLSLPCFLSLPALALSPRSSFPSSFPLSLLSLLRLFARFGSFFFFPSSVSLLFLLFAASCLRCLPSSFCSLLAVSVPLGLRPLSSSLSSLFRLSSLSLLSFPPPSLLAFPGSFRSLFLLFSPSVLSLLPPGVPACFPFLLRPFLLLCPLCSXCXRXGXVLGLGCLPSRRSFLVLGLLSVCCVFFXWFXCLFFWFFXXXXXXXXXXGXXKWCGGTGQTPTPPHRDEPILGGAQPWKCQSLLRVNQDAGPLTAHDPGLLSNLPIRMLEVHDGQSKPGVMLMSSLPWMGSCGFPSSHGHPQPGLANRHCKQAPLPAAAQENSSI

SEQ ID NO: 2335 - DNA, 1426 bp, Homo sapiens
  source (1)..(1426)
  CDS (201)..(1226)
  modified_base (363)..(462): a, t, c, g, unknown or other
actgagcctgcacatctcaccctgaattcaaaatcaaaagatggggtgagggttctcggcaaaacgcagcctgagattctattttggagacccctgttccagagagaagagcagtgctcctgacacttggtgggtggggcccagggacgctgctcaacaccctgcagtgcacaggacgcccccacagtcattcaacttaaatgttattagtgataaagttgagaaagactctatctattgtctatctatgtatccatctatccacccattcatctatcatcatttatctattacctatgtatcatttatctattatgtctatacatctagccatccatcatccatcatcattatttattatcnnnnnnnnnnnnnnnnnnnnnnnnnnnnnnnnnnnnnnnnnnnnnnnnnnnnnnnnnnnnnnnnnnnnnnnnnnnnnnnnnnnnnnnnnnnnnnnnnnnnttctcttttcttcttatgtactctttcttttttctctcttctttccttccttcctttctttccatccctccctccttctttccttttcccctctccatcccttcctcctttccttccttcctttctttttttcctctctattctttgtctctcttcatccatctctccttttcttacatgcctcttttcttccttccttctttcttctctccctccttcccttctttccttccttccttcccttcctccttccctctcacattcccttcctccctccctccctcattgccttcctccctgcttcacttcttcctccctcccttcctccatacctccctgcttccttttttccaacctccttccctcctcgttccttccctctctttctgcctccctcccttccttcctcccatcccttcttcctgcttccctcctgctctccctgttccctgcctccctccctgccttcctctgtctctcccttcctccactccttaattttggtttccacttcccactctcacactttgagcctctatcccattacttccttgctcagagcagctctttctaacacctccctgctgctgggagccccagcgcacagcaaaagcagacccagcaccagtttactttttgtattattattttttatctttttcaaccttccatttcagatggctgaagacctaggggtgagcagagaacccagcccaggcctgcggagcgtcctgaccgtaatcgttttatctgctaagacatagccttaaagcaaacccttccatctgccgctcccctcgccctgctggcaaattcccaccacgatgggattctcaatcacatggcggattctctgccttcagttccatatgcttttgcctttctggatgcacagaagctcattatagcaaatcatatttctgcataagagcttcagaaaatgaagagaaatgcagatattttc

SEQ ID NO: 2336 - protein, 341 aa, Homo sapiens
  MOD_RES (55)..(88): Variable amino acid
MLLVIKLRKTLSIVYLCIHLSTHSSIIIYLLPMYHLSIMSIHLAIHHPSSLFIIXXXXXXXXXXXXXXXXXXXXXXXXXXXXXXXXXXLFSSYVLFLFSLFFPSFLSFHPSLLLSFSPLHPFLLSFLPFFFSSLFFVSLHPSLLFLHASFLPSFFLLSLLPFFPSFLPFLLPSHIPFLPPSLIAFLPASLLPPSLPPYLPASFFPTSFPPRSFPLFLPPSLPSSHPFFLLPSCSPCSLPPSLPSSVSPFLHSLILVSTSHSHTLSLYPITSLLRAALSNTSLLLGAPAHSKSRPSTSLLFVLLFFIFFNLPFQMAEDLGVSREPSPGLRSVLTVIVLSAKT

SEQ ID NO: 2337 - DNA, 1336 bp, Homo sapiens
  source (1)..(1336)
  CDS (201)..(1136)
  modified_base (235)..(334): a, t, c, g, unknown or other
  modified_base (1270): a, t, c, g, unknown or other
gacgaatacgtaggagcgatcgtggtgtggtgcgtaattgagtgtcttctttgcatagaaagaagcacatactactatctcacgtcataaggactagtataaatgtaggagagcctatttagtaatacctcctactttgatcgtagtcatcgtcttgttcctttgaccccttattaataaagcttctcccctataggtatatggagcatagccacgttattctggaatacgagtnnnnnnnnnnnnnnnnnnnnnnnnnnnnnnnnnnnnnnnnnnnnnnnnnnnnnnnnnnnnnnnnnnnnnnnnnnnnnnnnnnnnnnnnnnnnnnnnnnnntggttttcctttctcggttgtttggtgtttttttgtcgttggtttgtgctctcgtccgtcggtttgtctgttctgtatcgttcttgtcggttgtgtattttcctggttctgtttgtttggttggttcttcttctgttttgctgtcggtttcgtttgttgttgtttttcgtcgcttcgttttcgtttgttgttgtttgtgctatctggtctcgtattcgcgtgtcttctcgtctttatcgttgcgtgtcctttcgtgttcgtctgtttttgtctttttgtccctgcttctatttcctcttctttgtttgcagttgggcttctgttgttgcctggtgtgttgcttctagtgtgctcttcgtctttcttccggttctctgttttcgcttctcccgacttgcatcctcttttgttttttgtggttccttcttcttttggtctcccctgcttccttcggttttttggacctttctttttgttgctttccttttatgttgtcttgctcttgtttgtcgtgctctcttttctctcttctcctctcccggctggttctcgtgtgcgttatcttgtcgcctgggctttttttgttttgttttttgttgttttttattgttgtgtcgttttggcttttttttcgttttgttttgtttggttgttcttttgtggtggttttctgtgtttttttttttggttcttctttttttgttttttggcttttggtgtcggtcttgtttttcgttttggtggctcgggctcgtttattttcatgctgttctcgtctcctttttcatctgtgtctctgtgatttgctatttccccttgtctttctttaaaatggagccgctgttaaacacctgttgatgggcttgccagggctgcgggatgtttggtggtgggatatgtgtggacgcaggattgaacaaatgttgcaacaaccanggaaacaacgctgatggacccatggatgtgacagaattgcagagctgcagtgaccccagatgaaag

SEQ ID NO: 2338 - protein, 311 aa, Homo sapiens
  MOD_RES (12)..(45): Variable amino acid
MEHSHVILEYEXXXXXXXXXXXXXXXXXXXXXXXXXXXXXXXXXXGFPFSVVWCFFVVGLCSRPSVCLFCIVLVGCVFSWFCLFGWFFFCFAVGFVCCCFSSLRFRLLLFVLSGLVFACLLVFIVACPFVFVCFCLFVPASISSSLFAVGLLLLPGVLLLVCSSSFFRFSVFASPDLHPLLFFVVPSSFGLPCFLRFFGPFFLLLSFYVVLLLFVVLSFLSSPLPAGSRVRYLVAWAFFVLFFVVFYCCVVLAFFSFCFVWLFFCGGFLCFFFWFFFFCFLAFGVGLVFRFGGSGSFIFMLFSSPFSSVSL

SEQ ID NO: 2339 - DNA, 1273 bp, Homo sapiens
  source (1)..(1273)
  CDS (201)..(1073)
  modified_base (445)..(544): a, t, c, g, unknown or other
  modified_base (597): a, t, c, g, unknown or other
tgtacatatgtatatatgtacatatgtacatatacgtatatgtacatatatacgtatacatgtacatatatgtatatatgtatatatttattatacatatatgtatatatttatatatttattatacatatatgtatatatttatatgttgagtatttatatgttgagtatatatactcaacatataaatacatacatatatgtataatatatacaaagtatatatacttgagtatatacaaagtatatataatatacactttgtatatatacttgtatatatacttgagtatatatactttgtatatattatacatatatgtatatatttatatggtgagtatttgtatatatactcaacatacaaatatacgtatatgtatgtatatatgtatatttgtatgttgagtatatataaaaatatgtatatacatatatttatatnnnnnnnnnnnnnnnnnnnnnnnnnnnnnnnnnnnnnnnnnnnnnnnnnnnnnnnnnnnnnnnnnnnnnnnnnnnnnnnnnnnnnnnnnnnnnnnnnnnnatatatacaaagtatatatatatatacttgtatatactcaagtatatatactntgtatatattatacatatatgtatatatttatatgttgagtatttatactcaacatataaatatatgtatatacatatatgtatatatttatatggtgagtatttgtatatatactcaacatacaaatatacgtatatgtatgtatatatgtatatttgtatgtttagtatatataaaaatatgtatatacatatatatgttgagtatatatactttgtatatatgtatatatacacacatatatttatatgttgagtatatatactctgtatatattatatatgtatatatttatatgttgagtatatattatatatttatatatttatatgttgagtatttatatatacttgagtatatatatacacatctgtatatatttatatgtcgagtatataaatactcgacatataaatatataatactcaacatatatatatgtatatacataaatatgtatatatttatatgttgagtatttcttttccaaaatgcttgggaccagaagtgttttagattttggatttttttatattttggaatatttgcatatatataatgagatatattggggataggacccaagcctaaataggaaatttatttatgttttatatatactttatacactgaaactgaaggtaactttgtataacattttaaataatcttgtgc

SEQ ID NO: 2340 - protein, 290 aa, Homo sapiens
  MOD_RES (82)..(115): Variable amino acid
  MOD_RES (133): Variable amino acid
MYNIYKVYILEYIQSIYNIHFVYILVYILEYIYFVYIIHICIYLYGEYLYIYSTYKYTYMYVYMYICMLSIYKNMYIHIFIXXXXXXXXXXXXXXXXXXXXXXXXXXXXXXXXXXYIQSIYIYTCIYSSIYTXYILYIYVYIYMLSIYTQHINICIYIYVYIYMVSICIYTQHTNIRICMYICIFVCLVYIKICIYIYMLSIYTLYICIYTHIYLYVEYIYSVYIIYVYIYMLSIYYIFIYLYVEYLYILEYIYTHLYIFICRVYKYSTYKYIILNIYICIYINMYIFIC

SEQ ID NO: 2341 - DNA, 1234 bp, Homo sapiens
  source (1)..(1234)
  CDS (201)..(1034)
ctaattcataaaccagactgactaagttatgttcacggaacaaagctcttttcttacttcctttgctcctacgatcccattccctcactatgcttcttgaaattctttcagggcccatttcaaaagccatttcttgaagttttttataatctctcccgaacatatgagagagttccctcctgagaaccctaaaactccttatgtgtgtttatgatacttctgccttatgcacacaagcatgtatattcatacctgcccagtgtgtgtgtgtgtgtgtgtgtatatatagtgtgtatatatatactgtgtgtatacatatacatatatacatatatatgtacacacacaccatgtatatatgcatatatacgtatctgtacacacgcaccgtgtatatatgcatatatacgtatctgtacacacgcaccgtgtatatatgcatatatacgtatctgtacacacgcaccgtgtatatatgcatatatacgtatctgtacacacgcaccgtgtatatatgcatatatacgtatctgtacacacgcaccgtgtatatatgcatatatacgtatctgtacacacgcaccgtgtatatatgcatatatacgtatctgtacacacgcaccgtgtatatatgcatatatacgtatctgtacacacgcaccgtgtatatatgcatatatacgtatctgtacacacgcaccgtgtatatatgcatatatacgtatctgtacacacgcaccgtgtatatatgcatatatacgtatctgtacacacgcaccgtgtatatatgcatatatacgtatctgtacacacgcactgtgtatatatacatatatgtacacacactgtatatatacatacatacatatatgtacacatactgtatatatatacatatatacatatatgtacacactgtatatatacatatatacatatatgtacacacactgtatatagatacacatatatgtacacacacactgtgtatatatacacatatatgtacacacactgtatatatacatatataaatatatgtatacccgcacactatatatacatatatgtgtatatatacatacgtatgtgtatatatacgtatgtgtgtatatatacgtgtgtatatatatatacgtacatgtatgtgaacacaattatatgcatacaagtacatggtatagctaagagctgataagatattaagaggaaagctccatttttcatcataagg

SEQ ID NO: 2342 - protein, 277 aa, Homo sapiens
MCVYDTSALCTQACIFIPAQCVCVCVCIYSVYIYTVCIHIHIYIYMYTHTMYICIYTYLYTRTVYICIYTYLYTRTVYICIYTYLYTRTVYICIYTYLYTRTVYICIYTYLYTRTVYICIYTYLYTRTVYICIYTYLYTRTVYICIYTYLYTRTVYICIYTYLYTRTVYICIYTYLYTRTVYICIYTYLYTRTVYICIYTYLYTRTVYIYIYVHTLYIYIHTYMYTYCIYIHIYIYVHTVYIHIYIYVHTLYIDTHICTHTLCIYTHICTHTVYIHI

SEQ ID NO: 2343 - DNA, 1798 bp, Homo sapiens
  source (1)..(1798)
  CDS (201)..(1598)
  modified_base (264)..(363): a, t, c, g, unknown or other
  modified_base (1415)..(1514): a, t, c, g, unknown or other
ctgtccattgtttaatcatctaaaattattccaagtgaaaagtttatttttaaaaaacagagatacttgccaaggataaaacatctagtccaaggaagaggaagatgaggatgaagtggttgaggatggagttgaggaattaggtagtccttttgggaagctgcattgtcacctggagtgacaatttcccaacttagaagatgttctcttctctgaaggaattaactgccctacactacttcaccacgggggtgaaggatagcnnnnnnnnnnnnnnnnnnnnnnnnnnnnnnnnnnnnnnnnnnnnnnnnnnnnnnnnnnnnnnnnnnnnnnnnnnnnnnnnnnnnnnnnnnnnnnnnnnnngctatccttcagccccttggactcgagacgtacatatcgcgtatacactcactctgcacatgctacatatacgtctacacgctgtcatctcacgcacgtctgcactctgctacatatacgctctacatgtactgcatatgtacgtacactatatacaatcgtctatgctatctacacgtgctactcatacatgtgcatgtctatatgtgtcgcacgtatactgtacgctcacactcactgtgtctcatgtgtatctcatatctgcgtactacacgtatcgtcatctcgcgcatcgcatatacgtatcatcgtcatgcacgcactgctgtgtacgctcgcacatgcatacgcactcatctatatgtctctgtatatcatgtcacacgtacgtgtatctgtgtgcatctcgtatatacgtatcacgcactgctctatgtctgtacactgtatgtgtgtgcactactacgctgtctcatcatgctctgcactctgtcgtactgtacgtgtgctcatatacgctgtgtcatgcatacatatactgctctatatcacacgtctatactcgtacgcgctcgcacactctatgtacatgtctacacatcgtgctcactatacgtctcatatgtgcgtactctgtatatacatgcactgctgtatctcatgtgtacactacgtgtgtgcacatctctgtctatatgtatcatgctgtgtcacgtacgtatatctgtgtgcatgtactcgctgtcatgtgctgctatgctgctactacgtgtacgtcgtcatacgctgtcgcatcatatatgtcgtctgcatactatacgcacacgtgtgtatcactcgctatatactgcacatacgctctgtgtatcatactacacgtctgcatatacgctatcactcatgtactgtctgtcatcactcgtgcacacactacgtatgcgctgctatatctatgtcgcgtatatcgtcatactatgctgtcatcatatgcgcatcacacacactgtatatcatcgcacatactatgctgcagaccaaggggtggaaggaannnnnnnnnnnnnnnnnnnnnnnnnnnnnnnnnnnnnnnnnnnnnnnnnnnnnnnnnnnnnnnnnnnnnnnnnnnnnnnnnnnnnnnnnnnnnnnnnnnncccctcccctcccccccctctccccctcctcccccctccctctcccccctctcccctccccctatcccatctcactccacctaaggccaacgcaaggcataacgcactaagggtctacagggcgaaagccacacacacaaagcaagtcaagcaagcgacccaaaggaagaaatggagtaagatgaagcccagggtttttcaccactaggtttggcccccaggagcaacatctgtaggatgcccggcatcctcctgattggagagtggagtgtctgagtgggagt

SEQ ID NO: 2344 - protein, 465 aa, Homo sapiens
  MOD_RES (22)..(55): Variable amino acid
  MOD_RES (405)..(438): Variable amino acid
MFSSLKELTALHYFTTGVKDSXXXXXXXXXXXXXXXXXXXXXXXXXXXXXXXXXXYPSAPWTRDVHIAYTLTLHMLHIRLHAVISRTSALCYIYALHVLHMYVHYIQSSMLSTRATHTCACLYVSHVYCTLTLTVSHVYLISAYYTYRHLAHRIYVSSSCTHCCVRSHMHTHSSICLCISCHTYVYLCASRIYVSRTALCLYTVCVCTTTLSHHALHSVVLYVCSYTLCHAYIYCSISHVYTRTRSHTLCTCLHIVLTIRLICAYSVYTCTAVSHVYTTCVHISVYMYHAVSRTYICVHVLAVMCCYAATTCTSSYAVASYMSSAYYTHTCVSLAIYCTYALCIILHVCIYAITHVLSVITRAHTTYALLYLCRVYRHTMLSSYAHHTHCISSHILCCRPRGGRXXXXXXXXXXXXXXXXXXXXXXXXXXXXXXXXXXPLPSPPSPPPPPSLSPLSPPPIPSHST

SEQ ID NO: 2345 - DNA, 1333 bp, Homo sapiens
  source (1)..(1333)
  CDS (201)..(1133)
tggggggggggggcgcacgcacgtggggggggtggtgcatgggtgtgtgccgacacgtgggtaggcggtcagcgcaggtgtggggatagtgggggtgcgggtaggggtatgggtcacatgtgtgcgtgttatctgcacgcggtgggggtgtgtgtgcgcgcacgtgggtggcagcgcgcaagtgtggtgattgtgtgcacatgggtgtgtgcgtgcattggggtgtcagtgcgcgtgtgggtatctgtgtgcgcgcatgtgtgggtttgcgcgtgtgggtatctgcgtgcgtgggtgtgtgtgggtgggtgtgcatgtatggatatgtgtgggtatgtgtggatgtgtggatatgtgtgtgggtatgtgtgtgtgttgtgcgtgtgggtgtgcacgtgtgtgggtatgtgcgtgtgggggtatgtgtgcacgtgtgtgcgtgcgaacgtgtatgtgcacgtgtgtgggtgcattgtgtctgcacgagggtgtgtgtgcatgcatgtgtgcatgtgggtgggtgtgtgtgtgcacatgcatctgtgggtgtgtttgcatgtgtatgggtatgtgcacgcacgtgtgggggtgtgtgtgcacgtgtcccgtgtgtccatgggagtgtgtgtgcgtgggtatgtgtgggtgtgcatgtgtgggtatgtgtgcacgtgtgtggatatgtgtgcacatgtgtgggtgggtgtgcacatgcatgtgggtatgtctctgtgcatgtgtgtgggtatgtgcgtgtgggtggatatgtgtgcatgtgggggtgggtgtgtgtgtgcacgcatgtgtgggtaagtgtgtgtgtgcatgtgggcgtgcgcgtatgtgtgcatgtgtgtgcggggtatgtctgtgtgcacacgtatgttccgcgtgtgtgcacacaggtgtgggtccgggtgcacgggtgtgggtctgtgtgcacgtgggtgtgggtttgcgtcatgtgggtgcgtgtacgtgtgtgggggtgtgtgcacgcgtgtgggtgtctgcgtgtgtgtggatgtgtgcgtgcgtgtggatgtgtgcatgtggctgtgtgtgtgcacgtgtgcccgtgtgtatgtgcacgtgggtatatgctgtgcgggtatgggtgtgcacacgtgtgatatatacacatgcatatgtgtgtgtgcatgtctgtgcatgaacgttcatgtcttggcctgtgtatagtgtgtgcacatggtcacacgtactggttgtatgcatgctacgtgtgcatgtatgtttcgtgttgtcatgaggtgtgtgtgcatgtgtgtttcatgtgttttcatgcatgcacatacgtgggcatttgtgtgct

SEQ ID NO: 2346 - protein, 310 aa, Homo sapiens
MGVCVHWGVSARVGICVRACVGLRVWVSACVGVCGWVCMYGYVWVCVDVWICVWVCVCVVRVGVHVCGYVRVGVCVHVCACERVCARVWVHCVCTRVCVHACVHVGGCVCAHASVGVFACVWVCARTCGGVCARVPCVHGSVCAWVCVGVHVWVCVHVCGYVCTCVGGCAHACGYVSVHVCGYVRVGGYVCMWGWVCVCTHVWVSVCVHVGVRVCVHVCAGYVCVHTYVPRVCTQVWVRVHGCGSVCTWVWVCVMWVRVRVWGCVHACGCLRVCGCVRACGCVHVAVCVHVCPCVCARGYMLCGYGCAHV

SEQ ID NO: 2347 - DNA, 1513 bp, Homo sapiens
  source (1)..(1513)
  CDS (201)..(1313)
  modified_base (394)..(493): a, t, c, g, unknown or other
tggctttggaatgaggtggattagggctggaggggcagacatggagaagagaatgagtgagaggccaggcactgtggatcagtcttcagctccctggatttgggggacttatcaccagccatgggggaggcctggttttcgtacaccagagggacagacggctgctctgctgtgggagcaaagtcctgaagaacatcagcatgcagccctcccacagccacacacacatacacacacacacacacacacacgtgcacataaacacagatacacactcacactcacagatacacatgcacacacagatacacacatgtgtgcacacagagatatacaggtgggcacacacacagatacataaacgtgtacacacagacactcacaggtacatatnnnnnnnnnnnnnnnnnnnnnnnnnnnnnnnnnnnnnnnnnnnnnnnnnnnnnnnnnnnnnnnnnnnnnnnnnnnnnnnnnnnnnnnnnnnnnnnnnnnnggacgcgtgtcacatgtgcacatgcctgtgtgtaggatgcgtgtgtacgtgtgtgctggggatgcgtgtcacgtgtgcacatgcctgtgtgggggatgtgtgtgcacgtgtgtgcctggggacgcgtgtcacgtgtgcacatgcctgtgtgtgtggggatgtgtgtgcacgtgtgtgcctggggacgcatgtcacgtgtgcacatgcctgtgtgtggggggatgcgtgtgcacctgtgtgcctggggacccatgtcacgtgtgcacatgcctgtgtgtggggggatgcgtgtgcacctgtgtgcctggggacccgtgtcacgtgtgcacatgcctgtgtgtggggggatgcgtgtgcacctgtatgcctggggacccgtgtcacgtgtgcacatgcctgtgtggggggggatgcgtgtgcacctgtgtgcctggggacgcatgtcacgtgtgcacatgcctgtgtgtgtggggatgcgtgtgcacctgtgtgcctggggacccgtgtgacgtgtgcacatgcctgtgtgtggggggatgcgtgtgcacctgtgtgcctggggacgcgtgtcacgtgtgcacatgcctgtgtgggggatgcgtgtgcacctatgtgcctagggacgcatgtcacgtgtgcacatacctgtgtgggggggatgcgtgtgcacgtgtgtgcctggggacgcgtgtcacgtgtgcacatgcctgtgtgtgtggggatgcgtgtgcacctgtgtgcctggggacccgtgtcacgtgtgcacatgcctgtgtgtgtggggatgcgtgtgcacctgtgtgcctggggacccgtgtgacgtgtgcacatgcctgtgtgtggggggatgcatgtgcacctgtgtgcctggggacccgtgtgacgtgtgcacatgcctgtgtgtgtgggatgcgtgtgcacctgtgtgcctgggacccagaggtgaaatcacaaccacctgaggtccccagcaccacctgcccccgagctccagcccaggcaccttgccttgctttcatc

SEQ ID NO: 2348 - protein, 370 aa, Homo sapiens
  MOD_RES (65)..(98): Variable amino acid
MQPSHSHTHIHTHTHTHVHINTDTHSHSQIHMHTQIHTCVHTEIYRWAHTQIHKRVHTDTHRYIXXXXXXXXXXXXXXXXXXXXXXXXXXXXXXXXXXDACHMCTCLCVGCVCTCVLGMRVTCAHACVGDVCARVCLGTRVTCAHACVCGDVCARVCLGTHVTCAHACVWGDACAPVCLGTHVTCAHACVWGDACAPVCLGTRVTCAHACVWGDACAPVCLGTRVTCAHACVGGDACAPVCLGTHVTCAHACVCGDACAPVCLGTRVTCAHACVWGDACAPVCLGTRVTCAHACVGDACAPMCLGTHVTCAHTCVGGMRVHVCAWGRVSRVHMPVCVGMRVHLCAWGPVSRVHMPVCVGMRVHLCAWGPV

SEQ ID NO: 2349 - DNA, 1477 bp, Homo sapiens
  source (1)..(1477)
  CDS (201)..(1277)
aaaacttcctaaactaacaggagaatcggcaggggtcttaactttcacaaaagatgatacttactgctctgaaggctctttaacgacttgttttatttactctgaaggtacgctacgtaaatcagattcatcaaaagtattcatattgtctaataagaatcctcccgaaattccagtgatccgctaagggagaaggcactatgaaaaagatcatttatgttttctttctcttgtttagcttcataagtcttggttctgcttatgctgaagattactacactaatcctcaagacttagggcaggggacagaaacagtcaacaatgccgatgctggtactggtgctggcaataacaatattgctgattcaatgtcccaggtgacgcaaaacggaatgcaagagcttgattcagtcgttgatagcttaatcacagatgtagataaaaatattaaagacaatattcaaggctactaccaaaaagtaactgctccaattattccagtctttgcaggctttattgtcatttggctgacctttcaaggcatgaaaatgatgctgggtatgcctgttgagattcagcaagttattgcgactttcgtgcttatgctgctgatctggacaatcgttttttcatgggatgccttctttccttatgtagctgaagttttcctagatgatgtgccgaacctgatcactgaaatgacaggcaccgattccaaaaccacacttcaatcatttgtttctattatttttgaagctatcgcactggcttttaacaacattgacacaggcatcaccaacgttgtgagtggctttttcttcgtcctgatttactcctttatcttcgggctggcttgtctagtttgtgctttgttcttcctgatttgggtcatttgcaaagtaatcatcgggattttaattgctgttgcccctatttttcttgctgctgcaatgttcccagctactcgtagatatgcgaccaactggcttcaagcggtattaactccaaacgtggttttactactactgatcgtaagctgcgacctagttttaacttcagtagtgaagggtatccagcacttaaatgataacggcagcaccttcacaggggcttttgtcatggtcattgttctgcttgttgtagtaggtcttttcgcaattattccaaaaattgcaatttctcttgtcggcagcggttttgaagcttcaaccagtgcaactacaggtgtaaccaattctgcgactaatgcagttaaacgctttgggagtaaacgataatgctgcctcaaactaaagatcagctagacgctcaatttaaagcccttcaggaaagcgttaaaaagagtgaaaaccgtaacggcaaaattacactgtggtcgctgggactttgtggggttttagcagtaggaaatattactcaagcaattgctaactacaatctaactccattaaaaacaaccgaaccgatcattgccgtg

SEQ ID NO: 2350 - protein, 358 aa, Homo sapiens
MKKIIYVFFLLFSFISLGSAYAEDYYTNPQDLGQGTETVNNADAGTGAGNNNIADSMSQVTQNGMQELDSVVDSLITDVDKNIKDNIQGYYQKVTAPIIPVFAGFIVIWLTFQGMKMMLGMPVEIQQVIATFVLMLLIWTIVFSWDAFFPYVAEVFLDDVPNLITEMTGTDSKTTLQSFVSIIFEAIALAFNNIDTGITNVVSGFFFVLIYSFIFGLACLVCALFFLIWVICKVIIGILIAVAPIFLAAAMFPATRRYATNWLQAVLTPNVVLLLLIVSCDLVLTSVVKGIQHLNDNGSTFTGAFVMVIVLLVVVGLFAIIPKIAISLVGSGFEASTSATTGVTNSATNAVKRFGSKR

SEQ ID NO: 2351 - DNA, 1564 bp, Homo sapiens
  source (1)..(1564)
  CDS (201)..(1364)
cagcatgcaccggacgcccaaaactggtatatcggagtcgccaatcaagactcaccggtgaataaagtctactggcaaaaagcggatggtggcttatgaagtcaacaacccttgaatgacttcgacaggaaaaagaattacagctttcagccacacaagggggagattttttctataattttcattttcagctctatggtatgccctacaccattggtcggctgattgtgacgattgctgcctttatcatgttattgactctgatttcaggaatcattacccataaaaaaatcctgacagacttttttaccctaagagcctttaaaggacagcgctcttatctggattttcataatgtcagttcagtgattgccctgccgttctttttgaccatgacatttaccgggttggcgattttcttttatatcgtgctgccttccggtatgaaaaaactttatccagacaatccctttcaatattttgaagaaattcgcacaatcaatacatcagccacccactcagttcctgtgaaaacccagatgctgccaattcaacattttatcaccacggcacagcaacactggggatatgcggaatttgacaatatcacggtcaagcagcccaatacccagctggcacacataaccttaactcagctcaaagatcattccattacacgaaatcaggcacagcttattttaaatgctgctaccggaaaattgcttgaaaatacacgaaatgaaagtgcaattgccacactaaatgccagcatgtatggtttacatatggcacgttttgccgaacctgttttacgtttagggttatttttctccggcatattaggctgcgcaatgattgcatccggattgctgctgtggagcctgaaacgccagatgcagaaaaaatcagtgcggtttcatctcggacactatttagtgaaccgcttgaatatcaccataattattggcttgccgcttgccatgctgggatatctctatgcgaatcgttttatcagtattcctgtaggtgcaccaaattatgaaatttatagttttttctctatctggcttggcagttttatcctggcatgtgtaaccccacagcaagatatatggagaatgcagcttaaacttctgatttgtgctgcctttataattcccctgattgatatttattatttagtttcccagcaatatgttgattcttttgcgacttattggccttttttgcgtattgatctgatgttatggaccttggcactgcttgccctattgttacaccagaaaattacgcccattcagcaaaaggcggtcaataaaattcaggccaaactaaaatctgtgcagcaggagtcttccacatgatatggatcgcagtaaccgttcttttatggctaagctgctttgccttttatgcggtaagtgcaaagcagatcctaaaaacccgaaaatctcgttacgcttttttagctaattttcctacgcacactaaattcactgcgggtattttcttattcgtggcgatgtttttattacgtacccagtttagctccagtattagcttt

SEQ ID NO: 2352 - protein, 387 aa, Homo sapiens
MPYTIGRLIVTIAAFIMLLTLISGIITHKKILTDFFTLRAFKGQRSYLDFHNVSSVIALPFFLTMTFTGLAIFFYIVLPSGMKKLYPDNPFQYFEEIRTINTSATHSVPVKTQMLPIQHFITTAQQHWGYAEFDNITVKQPNTQLAHITLTQLKDHSITRNQAQLILNAATGKLLENTRNESAIATLNASMYGLHMARFAEPVLRLGLFFSGILGCAMIASGLLLWSLKRQMQKKSVRFHLGHYLVNRLNITIIIGLPLAMLGYLYANRFISIPVGAPNYEIYSFFSIWLGSFILACVTPQQDIWRMQLKLLICAAFIIPLIDIYYLVSQQYVDSFATYWPFLRIDLMLWTLALLALLLHQKITPIQQKAVNKIQAKLKSVQQESST

SEQ ID NO: 2353 - DNA, 1624 bp, Homo sapiens
  source (1)..(1624)
  CDS (201)..(1424)
  modified_base (246)..(345): a, t, c, g, unknown or other
  modified_base (1445)..(1544): a, t, c, g, unknown or other
tagtatatgggaccactgtcacatatgtggtccatcattgatggacatgtcattattcagtacatgactgtatgtatatatacacatacaaacatttataatgtgcttgtgaatgtgtatatatattcatatcacacacatgtagatatatcctaatatatgtataaatagtatatacataattgaaatacatcattttaatggttcaagaacagcctagcttggatccggccataagggccaatnnnnnnnnnnnnnnnnnnnnnnnnnnnnnnnnnnnnnnnnnnnnnnnnnnnnnnnnnnnnnnnnnnnnnnnnnnnnnnnnnnnnnnnnnnnnnnnnnnnnctgttgggtggcatgttctatcttctgttgttgggtggagcgttctatcttctgttgttgggtggagcgttctatcttctgttgttgggtggagcgttctatcttctgttgggtggcacgttctgtattctgttgttgggtggcgtgttctgtattctgttgttgggtggcgtgttctatattctgttgttgggtggcgtgttctatattctgttgggtggcatgttctatattctgttgttgggtggcgtgttctatattctgttgttggtggcgtgttctactgttgttgggtggagtgttctatcttctgttgttgggtggcgtgttctatcctctgttgttgggtggagtgtactgtattctgttgttgggtagattgttctatattctcttgttggatggcatgttctatcttctgtagttgggtggcgtgttctgtattctgtagttgggttacatgttctatattccattgttgggtggcgtgttctatattctgttgttgggtggagtgctgcatattctgttgttgggtggcgtgttctatattctgttgttgggtggcgtgttctatattctggcgttgggtggcgtgttctatattctgttgttgggtggagcgtctatcttctgttggtggcgtgttctgtattctgttgttgggtggcgtgttctgtattctgttgttgggtggcgtgttctatattctgtttttgggtggattgtatattctggtgttgggtggattgttctatcttctgttgttgggtggagtgttctatattctgttgttgggtggaatgttgtctattctgttgttgggtggattgttctatattctgttgttgggtggtgtgttttatattctgttgttaggtagcgtgttgtatattctgttgttgggtggcgtgttctatattttgttgatggcgtgttctatattctgttgttgggtggattgttctatcttctgttgttgggtggcgtgttctatattctgttgttgggtggattgttctatcttctgttgtgtggatggcgtgttgtatattctgttgttgggtggcgtgttctaaattcccgttgttgggtggatnnnnnnnnnnnnnnnnnnnnnnnnnnnnnnnnnnnnnnnnnnnnnnnnnnnnnnnnnnnnnnnnnnnnnnnnnnnnnnnnnnnnnnnnnnnnnnnnnnnnatattctgttgttgggtggcgtgttctgtattcttttgttggtggggtgttctatattctgttgttggtggagtgttctg

SEQ ID NO: 2354 - protein, 407 aa, Homo sapiens
  MOD_RES (16)..(49): Variable amino acid
MVQEQPSLDPAIRANXXXXXXXXXXXXXXXXXXXXXXXXXXXXXXXXXXVGWHVLSSVVGWSVLSSVVGWSVLSSVVGWSVLSSVGWHVLYSVVGWRVLYSVVGWRVLYSVVGWRVLYSVGWHVLYSVVGWRVLYSVVGGVFYCCWVECSIFCCWVACSILCCWVECTVFCCWVDCSIFSCWMACSIFCSWVACSVFCSWVTCSIFHCWVACSIFCCWVECCIFCCWVACSIFCCWVACSIFWRWVACSIFCCWVERLSSVGGVFCILLLGGVFCILLLGGVFYILFLGGLYILVLGGLFYLLLLGGVFYILLLGGMLSILLLGGLFYILLLGGVFYILLLGSVLYILLLGGVFYILLMACSIFCCWVDCSIFCCWVACSIFCCWVDCSIFCCVDGVLYILLLGGVF

SEQ ID NO: 2355 - DNA, 1120 bp, Homo sapiens
  source (1)..(1120)
  CDS (201)..(920)
tgcgaccattcttgattacctttcacgctcctcttacctcctcacctctcctgtcctctttgccctcattctacttttcctgcgctatatttcgtcttgttcaccttccggacctttcgcgctgcgttaccgcttgtcttttacctcctcttcatcgtgcgttcctccgtttgtctcattctctgtgtagtatcttgtccatgctcttccccgcctcgcttcgtgtttgtcctcactgtctttcactccgtcttcgtcgtgttcccgttctttctccgcttcttgtcgttctttttcctctccatgctctttctttccttcccgtttctccctttcctcacgtcacccctctcccttgcctcccctctcctcgtcctttaatctcgttcttttccttcttgccctcttgctctctctttcctgctttcccccgttatctttgttctgctctctcccttctccctgcttccttcttcttccatgcttccctcctttcttttgctcttcctccccgctgtctccttctccttctcctttcgtttgcctgtcttggtcttttctgttctttcgtcctattcttttccgtcggtcttctagttgtctgttttctctctccttgcctccttggttttgttttcgttctgtttttttttcttcttcgctggttgtttcttctgtgttctttctttcttctatcttccttctttcgtgactgtcttgcttgttctctttctttcctttttctttcgcttggtgcgttagtttcccgtttcttcctcctcctgtatccttcccttcctcccttgttttcttgctttccttcctcattccctccgttccttccctccctctcgcctctggggaagtgggcacttaacttgcaaattatcatgaggatttcaatgagttattccatataaaacactagggaaaatgctgggcacatagtaggtgcttaaatattagatatttttaaaatttttattttaaaattgtaagtggacaaattacagttgtatgtatttatggagtaaaaagtgatatgatttgtgaatacagtgtgggataatttaacctacttaacatgtctctcactgcaaatacttattttttgtggtga

SEQ ID NO: 2356 - protein, 239 aa, Homo sapiens
MLFPASLRVCPHCLSLRLRRVPVLSPLLVVLFPLHALSFLPVSPFPHVTPLPCLPSPRPLISFFSFLPSCSLFPAFPRYLCSALSLLPASFFFHASLLSFALPPRCLLLLLLSFACLGLFCSFVLFFSVGLLVVCFLSPCLLGFVFVLFFFLLRWLFLLCSFFLLSSFFRDCLACSLSFLFLSLGALVSRFFLLLYPSLPPLFSCFPSSFPPFLPSLSPLGKWALNLQIIMRISMSYSI

SEQ ID NO: 2357 - DNA, 1447 bp, Homo sapiens
  source (1)..(1447)
  CDS (201)..(1247)
tccagcagcccttccagcaggaaagcctctgattggccaagagagggtcacatgtccatctctgaaccaataagagcattcagatcaggcctttgattggcaggcctgggtcccgcccggtttataaacaactcagagaggatgagccaccctcccagatcacacaacatggctgtcccttgctctgctcgtgtgtgtgtatgtgtgtgtgtgtggtgtggtgcgtgtggtgcatgtgtgtggtgtctgtgtgtgtggtatgtgcgtggtctgtgtctggtgtgtgtatggtgtatatgtctgtgtgtggtgtgtgtgttgtgtgtgtatggtgtgtgtgtgtggtgtgtgtgtgtggtgtgtgtggtgtgtgtgtgtggtgtgcgtatggtgtatgtgtctgtggtgtgtgtgtggtgtgtgtgtctggtatttgtgtgtggtgtgtgtgtggtgtatgtgtggtgcgtatggtgtatgagtctgtgtgtgtggttgtgtgtgtggtgtgtgtgtgttgtgtgtgtgtgtgttgtgtgtgtgtgtggtgtgtgtatctgtgtggtgtgtgtctggtgtatatgtctgtgtgtgtggtgtgtgtctgtgtgtggtgtgtgagtggtgtgtgtctgtgtcgtgtgtctgtgtggtgtgtgtgtatgtgtggtgtgtgtctgtgtggtgtgtgtggtatgtgtgtgtctgtgtgtgatgtttatgtgtgtggtgtgtgtgtggtgtatggtgtgtctgtgtgtgggtgtgtctgtgtgaggtgtgtgtgtgtggcgtgtgtctgtctgtgtgtgtggtgtgtgtctgggcccccaagctctggctcctgtaaggccacctttcctgccccctcctcctctgatcacatcgtcgggtatgagccacaagtcccacctgctctgctggacgggacttccctggccggggtggggcctcgctcatctctgaacctcctctcccaacccaccctccagggcgcctcccagccctgggcctcgcttgctgtgtggattctgggagcccttgggctgggaaggacctatggtccccacctccaggcacaggcagctcgccccctccaggggctccctggggtggctggtttgggggaagtcgatccgaccctccaccccctaaatcggcccggcctcgagtcagggacgtcccccagaggctccgatgcccctttccagctgcgcgacttggagcaggttccgcatccacgatagcgagggggtccgggcgcggtggctcacgcctgtaattccagcactttgggaggtcaaggtgggcggatcatctgaggccaggagtttgagaccagcctggccaacatggtgaaaccctgtctctactaaaaatacaaaattagttgggcgtggtggcaggcgcctgtaatcccagctactcgggaggctgaggcaggaca

SEQ ID NO: 2358 - protein, 348 aa, Homo sapiens
MCVCVVWCVWCMCVVSVCVVCAWSVSGVCMVYMSVCGVCVVCVWCVCVVCVCGVCGVCVWCAYGVCVCGVCVVCVSGICVWCVCGVCVVRMVYESVCVVVCVVCVCCVCVCCVCVWCVYLCGVCLVYMSVCVVCVCVWCVSGVCLCRVSVWCVCMCGVCLCGVCGMCVSVCDVYVCGVCVVYGVSVCGCVCVRCVCVACVCLCVWCVSGPPSSGSCKATFPAPSSSDHIVGYEPQVPPALLDGTSLAGVGPRSSLNLLSQPTLQGASQPWASLAVWILGALGLGRTYGPHLQAQAARPLQGLPGVAGLGEVDPTLHPLNRPGLESGTSPRGSDAPFQLRDLEQVPHPR

SEQ ID NO: 2359 - DNA, 1840 bp, Homo sapiens
  source (1)..(1840)
  CDS (201)..(1640)
  modified_base (1): a, t, c, g, unknown or other
  modified_base (12): a, t, c, g, unknown or other
  modified_base (20): a, t, c, g, unknown or other
  modified_base (29): a, t, c, g, unknown or other
  modified_base (39): a, t, c, g, unknown or other
  modified_base (48): a, t, c, g, unknown or other
  modified_base (51): a, t, c, g, unknown or other
  modified_base (61): a, t, c, g, unknown or other
  modified_base (75): a, t, c, g, unknown or other
  modified_base (77): a, t, c, g, unknown or other
  modified_base (95)..(96): a, t, c, g, unknown or other
  modified_base (98)..(99): a, t, c, g, unknown or other
  modified_base (110)..(112): a, t, c, g, unknown or other
  modified_base (120): a, t, c, g, unknown or other
  modified_base (126): a, t, c, g, unknown or other
  modified_base (130): a, t, c, g, unknown or other
  modified_base (134): a, t, c, g, unknown or other
  modified_base (143): a, t, c, g, unknown or other
  modified_base (146)..(148): a, t, c, g, unknown or other
  modified_base (150): a, t, c, g, unknown or other
  modified_base (152): a, t, c, g, unknown or other
  modified_base (155)..(156): a, t, c, g, unknown or other
  modified_base (158): a, t, c, g, unknown or other
  modified_base (161)..(162): a, t, c, g, unknown or other
  modified_base (182): a, t, c, g, unknown or other
  modified_base (186): a, t, c, g, unknown or other
  modified_base (189): a, t, c, g, unknown or other
  modified_base (192)..(194): a, t, c, g, unknown or other
  modified_base (224)..(227): a, t, c, g, unknown or other
  modified_base (235): a, t, c, g, unknown or other
  modified_base (241)..(242): a, t, c, g, unknown or other
  modified_base (249): a, t, c, g, unknown or other
  modified_base (264): a, t, c, g, unknown or other
  modified_base (266): a, t, c, g, unknown or other
  modified_base (270)..(369): a, t, c, g, unknown or other
  modified_base (409): a, t, c, g, unknown or other
  modified_base (429): a, t, c, g, unknown or other
  modified_base (437): a, t, c, g, unknown or other
  modified_base (481): a, t, c, g, unknown or other
  modified_base (489): a, t, c, g, unknown or other
  modified_base (506): a, t, c, g, unknown or other
  modified_base (528): a, t, c, g, unknown or other
  modified_base (578)..(579): a, t, c, g, unknown or other
  modified_base (605): a, t, c, g, unknown or other
  modified_base (644): a, t, c, g, unknown or other
  modified_base (647): a, t, c, g, unknown or other
  modified_base (664): a, t, c, g, unknown or other
  modified_base (711): a, t, c, g, unknown or other
  modified_base (715): a, t, c, g, unknown or other
  modified_base (737): a, t, c, g, unknown or other
  modified_base (837): a, t, c, g, unknown or other
  modified_base (912): a, t, c, g, unknown or other
  modified_base (965): a, t, c, g, unknown or other
  modified_base (999): a, t, c, g, unknown or other
  modified_base (1053): a, t, c, g, unknown or other
  modified_base (1089): a, t, c, g, unknown or other
  modified_base (1132): a, t, c, g, unknown or other
  modified_base (1196): a, t, c, g, unknown or other
  modified_base (1213)..(1214): a, t, c, g, unknown or other
  modified_base (1217): a, t, c, g, unknown or other
  modified_base (1284): a, t, c, g, unknown or other
  modified_base (1290)..(1291): a, t, c, g, unknown or other
  modified_base (1293)..(1294): a, t, c, g, unknown or other
  modified_base (1297)..(1298): a, t, c, g, unknown or other
  modified_base (1300)..(1301): a, t, c, g, unknown or other
  modified_base (1310): a, t, c, g, unknown or other
  modified_base (1322): a, t, c, g, unknown or other
  modified_base (1332): a, t, c, g, unknown or other
  modified_base (1345): a, t, c, g, unknown or other
  modified_base (1350): a, t, c, g, unknown or other
  modified_base (1352): a, t, c, g, unknown or other
  modified_base (1393)..(1399): a, t, c, g, unknown or other
  modified_base (1402): a, t, c, g, unknown or other
  modified_base (1409): a, t, c, g, unknown or other
  modified_base (1419)..(1421): a, t, c, g, unknown or other
  modified_base (1426): a, t, c, g, unknown or other
  modified_base (1437)..(1439): a, t, c, g, unknown or other
  modified_base (1450)..(1453): a, t, c, g, unknown or other
  modified_base (1458): a, t, c, g, unknown or other
  modified_base (1461): a, t, c, g, unknown or other
  modified_base (1464): a, t, c, g, unknown or other
  modified_base (1466)..(1467): a, t, c, g, unknown or other
  modified_base (1471): a, t, c, g, unknown or other
  modified_base (1474): a, t, c, g, unknown or other
  modified_base (1483): a, t, c, g, unknown or other
  modified_base (1485): a, t, c, g, unknown or other
  modified_base (1492): a, t, c, g, unknown or other
  modified_base (1514)..(1613): a, t, c, g, unknown or other
  modified_base (1649)..(1650): a, t, c, g, unknown or other
  modified_base (1704): a, t, c, g, unknown or other
ntgtgctgctgntgtgctgnttgttcccncgcctgctgngttgtttgnctncccctccgcnctgccgtttttcgntntgcttcgtgttctgctcnngnncgttgttcttnnngggttcgngcctgntgtncgtnttttgcttnccnnntncngcnntngtnntggctctccgtccccgtggntggnggngcnnnttcaaaatgaaagggggggcatggttctannnnatgttgtncgtganncggttgnggttggttggctcantntccnnnnnnnnnnnnnnnnnnnnnnnnnnnnnnnnnnnnnnnnnnnnnnnnnnnnnnnnnnnnnnnnnnnnnnnnnnnnnnnnnnnnnnnnnnnnnnnnnnnnttcctcctctccttcctcccttctttccccttccctctcntcctctctctttttttttcnttctttcnctcccccctcttttttttctcccttccctttttcttttccctcntcttcccncctcctttttcttttcnctctccccctttcctcctttcncttttttccctccttttttttccctcccctcttttttttttctcttttcnnctcttttctttccccttctttttttnctttttcctcctctcctcttttcttttttcccctttccnttnttccctttttttttccnccttttttttcccctccttttttttctccctttttttttttttttcnctcntccccctctcttctttcttttnccctttttctccccttttttctccctttctctcccccttttttttcctttttcttccctctcctttcctcctttccccttttctttcctttccccttccntcttttcctttcccttccttttctttttccttttttttttttcctttcccccctttcttccccttttttcctctncctttcttcccctcctttcctttctttccttcctttccttttttcctttcctnccctcttttttctccccctttttccccctttccntccttttcttcctttttttcttttttttcttttttttcttccttttctctctcnttcttctttttttcttctcttccttttttccttttnttcctttccttcttttctttttccttcctcctttctcttcctncttcccttccctcctttcccttttttccccttttcttttttcttttccccttctttttttctcnccctctttttttttccnnccncccttcttctttcttttcttcctttccttcttcctccccttctctcttccctttcttctccccttcnttttcnncnnttnntnnttttttttntttccctttctntttttttccnccncccccctttnttttntncccccctttttttctcaacttttcttttttttaaaactctnnnnnnnctntcccttntttttttttnnnccccnccggctttttnnnccccaccgcgnnnntttgnccnttncnntggngcngttcatttncnttgggcncttcttttttttaagaaccccnnnnnnnnnnnnnnnnnnnnnnnnnnnnnnnnnnnnnnnnnnnnnnnnnnnnnnnnnnnnnnnnnnnnnnnnnnnnnnnnnnnnnnnnnnnnnnnnnnnngggttttcctatgtgggcgtgccctaacataccagnnaatcccgccccctccttatgcccttaggccgccctgtctatcataagggcgganggggggggaaaatcggctatgcccccagaacccacgggggcccccttggcgttctttacactggatcggtgggggggggttaacaacgcgtgaccctagggggggcgttttgtttttcccttcccggagtttgcct

SEQ ID NO: 2360 - protein, 479 aa, Homo sapiens
  MOD_RES (8)..(9): Variable amino acid
  MOD_RES (12): Variable amino acid
  MOD_RES (14): Variable amino acid
  MOD_RES (17): Variable amino acid
  MOD_RES (22): Variable amino acid
  MOD_RES (24)..(57): Variable amino acid
  MOD_RES (70): Variable amino acid
  MOD_RES (77): Variable amino acid
  MOD_RES (79): Variable amino acid
  MOD_RES (94): Variable amino acid
  MOD_RES (97): Variable amino acid
  MOD_RES (102): Variable amino acid
  MOD_RES (110): Variable amino acid
  MOD_RES (126)..(127): Variable amino acid
  MOD_RES (135): Variable amino acid
  MOD_RES (148)..(149): Variable amino acid
  MOD_RES (155): Variable amino acid
  MOD_RES (171)..(172): Variable amino acid
  MOD_RES (179): Variable amino acid
  MOD_RES (213): Variable amino acid
  MOD_RES (238): Variable amino acid
  MOD_RES (255): Variable amino acid
  MOD_RES (267): Variable amino acid
  MOD_RES (285): Variable amino acid
  MOD_RES (297): Variable amino acid
  MOD_RES (311): Variable amino acid
  MOD_RES (332): Variable amino acid
  MOD_RES (338)..(339): Variable amino acid
  MOD_RES (362): Variable amino acid
  MOD_RES (364)..(367): Variable amino acid
  MOD_RES (370): Variable amino acid
  MOD_RES (374): Variable amino acid
  MOD_RES (378)..(379): Variable amino acid
  MOD_RES (382): Variable amino acid
  MOD_RES (384): Variable amino acid
  MOD_RES (398)..(401): Variable amino acid
  MOD_RES (403): Variable amino acid
  MOD_RES (407): Variable amino acid
  MOD_RES (409): Variable amino acid
  MOD_RES (413): Variable amino acid
  MOD_RES (417)..(418): Variable amino acid
  MOD_RES (420)..(425): Variable amino acid
  MOD_RES (428)..(429): Variable amino acid
  MOD_RES (431): Variable amino acid
  MOD_RES (438)..(470): Variable amino acid
MKGGAWFXXMLXVXRLXLVGSXSXXXXXXXXXXXXXXXXXXXXXXXXXXXXXXXXXXPPLLPPFFPLPSXPLSFFFXLXLPPLFFLPSLFLFPXLPXSFFFXLSPFPPFXFFPPFFSLPSFFFLFXXLFFPLLFXLFPPLLFSFFPFXXFPFFFXLFFPLLFFLPFFFFFXXPPLFFLXPFFSPFFSLSLPLFFPFSSLSFPPFPFSFLSPSXFSFPFLFFFLFFFSFPPFLPLFSSXFLPLLSFLSFLSFFPFXPSFFSPFFPLSXLFFLFFFFFFFFFLFSLXLLFFFSSFFPFXPFLLFFFLPPFSSXFPSLLSLFSPFLFSFPLLFFXPSFFFXXPFFFLFFLSFFLPFSLPFLLPFXFXXXXFFXFPFXFFSXXPLXFXPPFFSQLFFFLKLXXXXPXFFFXPXRLFXPHRXXLXXXXXXFIXXGXFFFLRTXXXXXXXXXXXXXXXXXXXXXXXXXXXXXXXXXXGFSYVGVP

SEQ ID NO: 2361 - DNA, 1486 bp, Homo sapiens
  source (1)..(1486)
  CDS (201)..(1286)
tgataaaaatgtaactaagcaagaaaacagttattggcaaattttctgtaaaggaccaaatagaaaatattttaggctgtataggccatacaggctctgtgacaactacttggcactgtcattgtggcacaaaaaaatatagccacggacaatatataacaaatggtcatggctgtgttccaataaatctttatatatatatgtgtatataccatacgtgtatatatacgtgtatatacgtgtatgaacacatacgtgtatatatacgtgtatacacgtgtatgtacacatacgtgtatatatacacgtgtatatatgtgtatgtacacatacgtgtatatatacgtgtatatacgtgtatgtacacaggtgtatatatacgtatatgtacgtatatgtgtatatatgtgtatatatgtgtatatatacgtatacgtgtatatatgtgtatatacgtatacgtgtatatatgtgtatatacgtatatatacgtatatgtgtatatatgtgtatttatacgtatatgtgtattatgtgtatatatacgtatatgtgtatatatgtgtatatatacgtatatgtgtatatgtgtatatatacttatatatgtgtatatgtgtatatatgtgtatatgtgtatatgtgtatatatgtgtatgtgtatatatacatatatgtgtatgtgtatacatgtgtatgtgtatatatacatatatgtgtatatatacatgtatgtgtatatatacatatgtgtatgtgtatatatacatatgtgtatgtgtatatatacatatgtgtatgtgtatatatacatatgtgtatgtgtatatatacatatgtgtatatatacatatgtgtatatatgtatatatgtatatatacatatgtgtatatatgtatatatgtatatatacatatatgtgtgtatatatgtatatatgtgtatttatacatgtgcatgtgtgtataaatatgtatatattatatgtgtgtatatatacatatatgtatgtatatatacatatatacatacatatatacatatatacacacatatacgcacatatagacatatatatgtatatatacacacatatatacatatatatgtatatatacacacatatatacatatatatgtatatatacacacatatatacatatatgtatatatacacatatatatgtatatatacacatatatatgatatatatgataagctgtatttggcacacaagacacagtttgttggttcctagaccagaaagtgctggaactttgtagattttgatacaatggataattatttgagtgactggattagtctgaaactttcctattgtattagccaatcatagctatataaaggatatgccattcagaattggggctactaaaaaacagatgttctttagttgattgaatttccttgccatgtcagaaatggaactcttcacttttggggattaaagtccaggttacca

SEQ ID NO: 2362 - protein, 361 aa, Homo sapiens
MCIYHTCIYTCIYVYEHIRVYIRVYTCMYTYVYIYTCIYVYVHIRVYIRVYTCMYTGVYIRICTYMCIYVYICVYIRIRVYMCIYVYVYICVYTYIYVYVYICVFIRICVLCVYIRICVYMCIYTYMCICVYILIYVYMCIYVYMCICVYMCMCIYTYMCMCIHVYVYIYIYVYIYMYVYIYICVCVYIHMCMCIYTYVYVYIYICVCVYIHMCIYTYVYICIYVYIHMCIYVYMYIYIYVCIYVYMCIYTCACVYKYVYIICVYIYIYVCIYTYIHTYIHIYTHIRTYRHIYVYIHTYIHIYVYIHTYIHIYVYIHTYIHICIYTHIYVYIHIYMIYMISCIWHTRHSLLVPRPESAGTL

SEQ ID NO: 2363 - DNA, 1489 bp, Homo sapiens
  source (1)..(1489)
  CDS (201)..(1289)
atacatactactaaacattctgttggctgtgagaatatatatatacacacacacacatacacacactgtgagaatgttccatatgtatatatatatgtatatgtatgttcagtgtgtgtgtatatatgtatatgtgcatatatatgtatatatgtgtatatatacacacacactgaacatacatatatatatatacacatatggaacattctcacagtgtatgtatgtgtgtatgtgtatatatatacatatatacgtgtatatatgtgtgtatatatgtatgtgtgtgtatatatatacatatacacacatatatacgtgtatatatgtgtgtatatatatacatatacacacatatatacgtgtatatatgtgtgtatatatgtgtgtgtatatatatatacatatacacacatatatatacatatatacacacactgaacatacatatatatatatacacacacatatggaacattctcacagtgtatgtatgtgtgtgtgtatatctatatacatgtatatatatgtatgtatatatatacatatatacacatatgtatatatacgtaccatatatgtatatgtgtatatatacgtatatatacatgtatatatacgtatatatacacatatacatatatacatttatatatacgtatatatacgtatacatatatatacacgtatatatacatacatatatacacgtgtatatatacgtatacatatatacacgtgtatatatacgtatacatatatatacacgtgtatatatacgtatacatatatacacgtgtatatatacgtatacatatatacacgtgtatatatacgtatacatatatacacgtgtatatatacgtatacatatatacacgtgtatatacatacatatatacacgtgtatatacatatgtatatacacgtgtatatatgtatatgtatacatatacgtatatatacatgtatatacacgtatatatacgtgtatatatgtatacatatacgtatatatacgtgtatatatgtatacatatacgtatatatacgtgtatatatgtatacaacatatacatatatacatgtatatatacatatatacatatatacgtatatatgtatgtgtatatatgtatatacctatgtatgtatatatacacatatatacgtatatatgtatatatatacacatgttccatatgtgtgtatatatatacacacacacactgaacatactgaacaatactgaacatatcctatatatacatgctgaacatatatactgaacatattcaatatattaatattcaatactcaacatacattcaatattgaatatattcatattgaattatctggtattagcatagtcgtgctcatttattttaatgatactttctcagtaatcctatgttttcaaattatagactatttcccccatctcattcttctcattcttctcctgcactctacccccttcatttgt

SEQ ID NO: 2364 - protein, 362 aa, Homo sapiens
MEHSHSVCMCVCVYIYIYTCIYVCIYVCVCIYIHIHTYIRVYMCVYIYIYTHIYVYICVYICVCIYIYIYTHIYTYIHTLNIHIYIYTHIWNILTVYVCVCVYLYTCIYMYVYIYIYTHMYIYVPYMYMCIYTYIYMYIYVYIHIYIYTFIYTYIYVYIYIHVYIHTYIHVYIYVYIYTRVYIRIHIYTRVYIRIHIYTCIYTYTYIHVYIYVYIYTRVYIRIHIYTCIYIHIYTCIYICIYTCIYVYVYIYVYIHVYTRIYTCIYVYIYVYIRVYMYTYTYIYVYICIQHIHIYMYIYIYTYIRIYVCVYMYIPMYVYIHIYTYICIYIHMFHMCVYIYTHTLNILNNTEHILYIHAEHIY

SEQ ID NO: 2365 - DNA, 1342 bp, Homo sapiens
  source (1)..(1342)
  CDS (201)..(1142)
  modified_base (64): a, t, c, g, unknown or other
  modified_base (66): a, t, c, g, unknown or other
  modified_base (74): a, t, c, g, unknown or other
  modified_base (413)..(434): a, t, c, g, unknown or other
  modified_base (956)..(1055): a, t, c, g, unknown or other
tacacaacttggcaacatgtaaacgtttttttttccaaaaaaaaaaataacacacacacacacncncacacacncacacacatatacgtgtatatatacgcgtgtatatacgcgtgtatataagcgtgtatatacacgtatatatatacgtatatgtgtataatacgtgtatatacgtatatatacatacacacgtatacatgcatatatacacacatatatacatacatatatacatgtatacgtgtatgtatacatatatacgtatatatacatatatacgtgtatatatacatatatacatatacacatatgtgtgtgtatatacatatgcatatatgtgtgtatatatacatatacatatatgtgtgtatatacgtatacatacatgtgtatatatatatacatgtacnnnnnnnnnnnnnnnnnnnnnnatgtacatatgtgtatttatgtacacatatgtacatatgtgtatttatgtacacacatgtacatatgtgtatatatgtatacgcatgtacatatatgtgtatatatgtatacacatgtacatatatgtgtatttatgtatacgcatgtacatatatgtgtatttatgtacacgcatgtacatatatgtgtatttatgtatacacatgtacatatatgtatttatgcatacacatgtacatatgtgcacatacgtatacatacatgcacatatatgtgtatatatgtatacatatatgtatgtatatgtgcatatacgtatacatatgtgcacatatacatgtgtatacacatatgtatgtatatgtatatatacacatatatgtgtgtgtatatgtatatatacacatatatatgtgtgtaggtgtgtatatgtatatatacacatatgtgtgtgtatgtgtgtgtgtatatatatatatgcacacacccctatatatgatgtgtatgtatatataacacgnnnnnnnnnnnnnnnnnnnnnnnnnnnnnnnnnnnnnnnnnnnnnnnnnnnnnnnnnnnnnnnnnnnnnnnnnnnnnnnnnnnnnnnnnnnnnnnnnnnngcctttcgtgtagttacaccaaaaattaaaaaaaatcctgccatttttgacagcatggatgaacctggaggacattatgccaggtgaggaattttttttttttttttttttttttgagacgtagtctcgctctgtcaccaggctggagtgcagtggtgcaatcttggctcactgtaacctctgcctcccaggttcaggcagttctcctgcctcagcctcgtgagtagctgggactacaggtgcacaccgccacgcccagccaattttttgtattttagtagagacga

SEQ ID NO: 2366 - protein, 313 aa, Homo sapiens
  MOD_RES (71)..(78): Variable amino acid
  MOD_RES (252)..(285): Variable amino acid
MHIYTHIYIHIYMYTCMYTYIRIYTYIRVYIHIYIYTYVCVYTYAYMCVYIHIHICVYIRIHTCVYIYTCXXXXXXXXMYICVFMYTYVHMCIYVHTCTYVYICIRMYIYVYICIHMYIYVYLCIRMYIYVYLCTRMYIYVYLCIHMYIYVFMHTHVHMCTYVYIHAHICVYMYTYMYVYVHIRIHMCTYTCVYTYVCICIYTHICVCICIYTHIYVCRCVYVYIHICVCMCVCIYIYAHTPIYDVYVYITXXXXXXXXXXXXXXXXXXXXXXXXXXXXXXXXXXAFRVVTPKIKKNPAIFDSMDEPGGHYAR

SEQ ID NO: 2367 - DNA, 1081 bp, Homo sapiens
  source (1)..(1081)
  CDS (201)..(881)
ctaattcataaaccagactgactaagttatgttcacggaacaaagctcttttcttacttcctttgctcctacgatcccattccctcactatgcttcttgaacttctttcagggcccattttaaaagccatttcttgaagttttttataatctctcccgaacatatgagagagttccctcctgagaaccctaaaactccttatgtgtgtttatgatacttctgccttatgcacacaagcatgtatattcatacctgctcagtgtgtgtgtgtgtgtgtgtgtgtatatagtgtgtatatatatactgtgtgtatacatatacatatatacatatatatgtacacacacaccgtgtatatatgcatatatacgtatctgtacacacgcactgtgtatatatgcatatatacgtatctgtacacacgcaccgtgtatatatgcatatatacgtatctgtatacacgcaccgtgtatatatgcatatatacgtatctgtacacacgcaccgtgtatatatgcatatatacgtatctgtacacacgcaccgtgtatatatgcatatatacgtatctgtacacacgcaccgtgtatatatgcatatatacgtatctgtacacacgcaccgtgtatatatgcatatatacgtatctgtacacacgcaccgtgtatatatgcatatatacgtatctgtacacacgcaccgtgtatatatgcatatatacgtatctgtacacacgcaccgtgtatatatgcatatatacgtatctgtacacacgcaccgtgtatatatgcatatatacgtatctgtacacacgcaccgtgtatatatgcatatatacgtatctgtacacacgcaccgtgtatatatgcatatatacgtaactgtacacacgcaccgtgtatatatgcatatatacgtatctgtacacacgcaccgtgtatatatgcatatatacgtatctgtacacacgcaccgtgtatatatgcatatatacgtatctgtacacacgcaccgtgtatatatgcatatatacgtatctgtacacacgcactgtgtatatatacatatatgtacacacact

SEQ ID NO: 2368 - protein, 226 aa, Homo sapiens
MCVYDTSALCTQACIFIPAQCVCVCVCVYSVYIYTVCIHIHIYIYMYTHTVYICIYTYLYTRTVYICIYTYLYTRTVYICIYTYLYTRTVYICIYTYLYTRTVYICIYTYLYTRTVYICIYTYLYTRTVYICIYTYLYTRTVYICIYTYLYTRTVYICIYTYLYTRTVYICIYTYLYTRTVYICIYTYLYTRTVYICIYTYLYTRTVYICIYTYLYTRTVYICIYT

SEQ ID NO: 2369 - DNA, 1966 bp, Homo sapiens
  source (1)..(1966)
  CDS (201)..(1766)
  modified_base (7)..(106): a, t, c, g, unknown or other
  modified_base (139): a, t, c, g, unknown or other
  modified_base (1915)..(1966): a, t, c, g, unknown or other
aggaagnnnnnnnnnnnnnnnnnnnnnnnnnnnnnnnnnnnnnnnnnnnnnnnnnnnnnnnnnnnnnnnnnnnnnnnnnnnnnnnnnnnnnnnnnnnnnnnnnnnngggccgcgccggggccggggtcggggccggcgngagaggccggcagcgaggtggcggcccggcggcggagccgcgccgcagccgggccagcttcatgcagcgccacttcggcgcgctcctgcagctgggcgtcaacaagttctcgctgcggatgttcggcagccagaaggccgtggagcgcgagcaggagcgcgtccagtcagcggggtcctggatcatccacccgtacagcgacttcaggttctactgggacttcaccatgctgctgttcatggtgggaaacctcatcatcatcccagtgggcatcaccttcttcaaggacgagaccactgccctgtggatcgtgttcaacgtggtctcggacaccttcttcctcatggacctggtgttgaacttccgcaccggcattgtgatcgaggacaacacggagatcatcctggaccaagagaagatcaagaagtacgtgcgcacgtggttcatggtggacttcgtgtcctccatccccgtggactacatcttcctcatcgtggagaagggcatcgactccgaggtctacaagacggcgtgcgccctgcggatcgtgcgcttcaccaagatcctcagcctcctgcggctgctgcgcctctcgcgcctgatccgctacatccaccagtgggaggagatcttccacatgacctatgacctggccagcgcggtgatgcggttctgcaacctcatcagtatgatgctgctgctctgccactgggatggctgcctgcagttcctggtggccatgctgcaggacttcccgtgcaactgctgggtgtccatcaatggcatggtgaaccactggtggagcgaactgtattccttcgcactcttcaaggccatgagccacatgctgtgcattgggtatggccggcaggcgcccgagagcatgacggacatctggctgaccatgctcagcatgattgtgagtgccacctgctacgccatgttcatcggccacgccactgccctcatccagtcgctggactcctcgcggcgccagtaccagaagtacaagcaggtggagcagtacatgtccttccacaagctgccggccgacttccgccagaagatccacgactactacgagcaccgttaccagggcaagatgttcgacgaggacagcatcctgggcgagctcaacgggcccctgcgggaggagattgtcaacttcaactgccggaagctggtgacctccatgccgctgttcgccaatgctgaccccaacttcgtcacggccatgctgaccaagctcaagttcgaggtcttccagccgggtgactacctcatccgcgaaggcaccatcgggaagatgtacttcatccagcacggcgtggtcagcgtgctcgctaagggcaacaaggagatgaagctgttcgatggctcctacttcggggagatctgcctgctcacccggggccaccgcatggcgagtgtgcgggccaacacctattgccgcctcctttcgctgagcgtggacaacttcaacgaggtgctggaggagtaccccatgatgcggcgcgccttcgagacggtggccatcgaccgcctggaccgcatcggcaagaagaattccatcctcctgcacaaggtgcagcatgaccttaactcgggcgtattcaacaaccagtagaacgccatcatccaggagatcgtcaagtacgacggcgagatggtgcagcaggccgagctgggtcggcgcctgggcctcttcccgccgccgccgccgccgcaggtcacctcggccatcgccacgctgcagcaggccgtggtcatgagctnnnnnnnnnnnnnnnnnnnnnnnnnnnnnnnnnnnnnnnnnnnnnnnnnnnn

SEQ ID NO: 2370 - protein, 521 aa, Homo sapiens [sequence omitted]

SEQ ID NO: 2371 - DNA, 1747 bp, Homo sapiens
  source (1)..(1747)
  CDS (201)..(1547)
tcaatttctttatctgtaaaatgcagatactagaacctaactcatcacattattgcaaagcaatgtgtgggaggcacaaggctcaatacaaagaaggagcttggcagtaatagtaatcatgactcttattaccactccagccagagttcagcagcagggaagagcaggtaaatgagaggtgtaaggaaagcacgaagaacatgctatcaggattcatgggtgggaagggggcaggggcggagcatggaaaagcctcaggaggctcctgtttgttcatccttcccttccccttcctcttccctttccgcattccccttcccgtttccttctccccctccctccctcctttctttcttttctttctttctttctttctttctttctttctttctttctttctttctttcttttctttctttctttctgtctctctctctctttctccctccctcgctcccttccctccttccttccttcctctctttctttcttttctttctttctttctttctttctttctttctttctttctttctttctttctccttttctctccctttcttttctttccctctttctttttttctttttctctttcttcctctctctctttctttctttctttctttctttctttctttctttctttctttctttctttctttctttctttctttctttcttttttttctctttcacagggtcttaagggtcttgctctgttgcccaggctggactgcagtggtgagatcatagctcactgcagcctcaacctcccaggctcaaatgatcttcccacctcagcacccccagtagatgggactataggcatgcaccatcacacctggctaatttttgtatttttggtagagacagggtcttgccatgttgcccagggtggtgtcgaactcctaggctcatgcaattctctcaccttgacctcccaaagtactgggattacaggtgtgagccccacacccagcccctttacactgtttatttttctaatgctcttgtttggggacttttacacttattccagaacatgcagtcagcacccagtgactatctgtggaaggagcgaaccaaggaatgatgtctccagctccagtgctccagagtttcagatgtggctctgtttcatccccatcctggctgctctggttcagagaacttgggtggcagactcactgccagcagtggggagcagcccctgccccacacgggcccagcctcaaggtcccggagtaagcacttcttgctccaagccatcttctagagagatgggagacagggaagctaggagcttctaccaccatctgagtcactgtggatggagagagccgctggagagacaggagtgcaagggcctggcgtggctctgcagctctggagacgtgggacaggccacttgcctttcaggggtgctatggcagagcctaccccgttggccttctcagcagtttgccttatgtctaaagcttcctgggcctgcagcacagggtgctagttttgcctatgggggcagccaaccctctaccaattaggttagagttggtggtgtacaacccattcctcagcgggtcagcctgagacatgtcctccccagccttgcagactgtcccgagggggagtgaaatataaagatgacctatttacgaatccatcctttacatgcttgtctttgttcactgtcttgatatcggtgttcccactgtgcctccacggcctcctgcctcctgtgttc

SEQ ID NO: 2372 - protein, 448 aa, Homo sapiens
MLSGFMGGKGAGAEHGKASGGSCLFILPFPFLFPFRIPLPVSFSPSLPPFFLFFLSFFLSFFLSFFLSFFSFFLSVSLSLSPSLAPFPPSFLPLFLSFLSFFLSFFLSFFLSFFLLFSPFLFFPSFFFSFSLSSSLSFFLSFFLSFFLSFFLSFFLSFFLSFFSLSQGLKGLALLPRLDCSGEIIAHCSLNLPGSNDLPTSAPPVDGTIGMHHHTWLIFVFLVETGSCHVAQGGVELLGSCNSLTLTSQSTGITGVSPTPSPFTLFIFLMLLFGDFYTYSRTCSQHPVTICGRSEPRNDVSSSSAPEFQMWLCFIPILAALVQRTWVADSLPAVGSSPCPTRAQPQGPGVSTSCSKPSSREMGDREARSFYHHLSHCGWREPLERQECKGLAWLCSSGDVGQATCLSGVLWQSLPRWPSQQFALCLKLPGPAAQGASFAYGGSQPSTN

SEQ ID NO: 2373 - DNA, 1396 bp, Homo sapiens
  source (1)..(1396)
  CDS (201)..(1196)
  modified_base (236)..(335): a, t, c, g, unknown or other
  modified_base (1062): a, t, c, g, unknown or other
caccctccctttccctgcaagtccccaaagtccattgtatcattcttatgcctttgcatcctcaaagcttagctcccacttatgagtgagaacataaaatgtttggttttccattcctgaattacttcacttagaataatggtctacagttccatccaggttgccgcaaatgccattagttcactgcaaaattcctttttatggccagtggtagtccacggtgtgtatgtgtatgnnnnnnnnnnnnnnnnnnnnnnnnnnnnnnnnnnnnnnnnnnnnnnnnnnnnnnnnnnnnnnnnnnnnnnnnnnnnnnnnnnnnnnnnnnnnnnnnnnnnttttttagtgatttcgtcatttttcaagtctcaagtggatctttctcgttttccatgattttcagttttcttgccatatttcacgtcctactgtggacatttctaaattttcaacctttttcagtttttttcgccatatttcccgtcctaaagtgtgtatttctcattttccgtgattttcagttttctcgccatattccaggtccttcagtgtgcatttctcatttttcacgttttttagtgatttcgtcatttttcaagtcgtcaagtggatgtttctcattttccatgattttcagttttcttgccatattccacgtcctacagtggacatttctaaattttccacctttttcagttttcctcgccatatttcccgtcctaaagtgtgtatttctcattttccgtgattttcagttttctcgccatattccaggtccttcagtgtgcatttctcattttaaacgttttttagtgatttcgacatttttcaagtcgtcaagtggatgtttctcattttccatgattttcagttttcttgccatattccacgtcttacagtggacatttctaaattttccacctttttcagttttcctcgccatatttcacgtcctaaagtgtgtatttctcattttccgtaattttcagttttctcgccatattccaggtccttcagtgtgcatttctcatttttcacgttttttagtgatttcgtcatttttcnaagtcgtcaagtggatgtttctcattttccatgattttctgttttcttgccatattccacgtcctacagtggacatttctaaattttccacctttttcatttttcctcgccatatttcatgtcctaaagtgtgaattacttattttccgtgattttcagttttctcgccatattccaggttctacagtgtgcatttcccatttttcacgtttttcagtgatttcgtcatttttcaagttgtcaagtggatgtttctcattatcaatgattttctgtcttcttgccatattttacgtcgtacagtggacatttctaaattttccatctttttcag

SEQ ID NO: 2374 - protein, 331 aa, Homo sapiens
  MOD_RES (12)..(45): Variable amino acid
  MOD_RES (288): Variable amino acid
MASGSPRCVCVXXXXXXXXXXXXXXXXXXXXXXXXXXXXXXXXXXFFSDFVIFQVSSGSFSFSMIFSFLAIFHVLLWTFLNFQPFSVFFAIFPVLKCVFLIFRDFQFSRHIPGPSVCISHFSRFLVISSFFKSSSGCFSFSMIFSFLAIFHVLQWTFLNFPPFSVFLAIFPVLKCVFLIFRDFQFSRHIPGPSVCISHFKRFLVISTFFKSSSGCFSFSMIFSFLAIFHVLQWTFLNFPPFSVFLAIFHVLKCVFLIFRNFQFSRHIPGPSVCISHFSRFLVISSFFXVVKWMFLIFHDFLFSCHIPRPTVDISKFSTFFIFPRHISCPKV

SEQ ID NO: 2375 - DNA, 1114 bp, Homo sapiens
  source (1)..(1114)
  CDS (201)..(914)
aaatttgcagagtaattgttcaggtctctatcttcattttaggtgtgtgacttttgtcatggattccttgctggtctcagtggctttagaattgtaagctggaggaggcctgagaagcatttttattcaaaacttgattcttctggggtggtatatacatatatttgtatgcatatacatatatatacacgtacatttgtatgtatatacatatatgtatatttgtatgtatatacaaatatatacatatatgtatatgtgtatgtatatacaaatatatacatatatgtgtatgtatatacaaatatatacatatatgtgtatgtatatacaaatatatacatatatgtgtatgtatatacaaatatatacatatatgtgtatgtatatacaaatatatacatatatgtgtatgtatatacaaatatatacatatatgtgtatgtatatacaaatatatacatatatgtgtatgtatatacaaatatatacatatatgtgtatgtatatacaaatatatacatatatgtgtatgtatatacaaatatatacatatatgtgtatgtatatacaaatatatacatatatgtgtatgtatatacaaatatatacatatatgtgtatgtatatacaaatatatacatatatgtgtatgtatatacaaatatatacatatatgtgtatgtatatacaaatatatacatatatgtgtatgtatatacaaatatatacatatatgtgtatgtatatacaaatatatacatatatgtgtatgtatatacaaatatatacatatatgtgtatgtatatacaaatatatacatatatgtgtatgtatatacaaatatatacatatatgtgtatgtatatacaaatatacatacaaatgtacaaaaatgtacatatatttgtaggtatatttgtgtgtgtccatatatttgtttgtattccctctctatattcatatggtatgcctgtataatttgggggggttgtatgcatatgcatatatttgggggtgcaggtctcgtttccttagtaaatacagtagaggctacttaggtttgtggagcatggtgtgcgtaggggcagtgcttttaactcccttcaacct

SEQ ID NO: 2376 - protein, 237 aa, Homo sapiens
MYIHICIFVCIYKYIHICICVCIYKYIHICVCIYKYIHICVCIYKYIHICVCIYKYIHICVCIYKYIHICVCIYKYIHICVCIYKYIHICVCIYKYIHICVCIYKYIHICVCIYKYIHICVCIYKYIHICVCIYKYIHICVCIYKYIHICVCIYKYIHICVCIYKYIHICVCIYKYIHICVCIYKYIHICVCIYKYIHICVCIYKYIHICVCIYKYIHICVCIYKYTYKCTKMYIYL

SEQ ID NO: 2377 - DNA, 1297 bp, Homo sapiens
  source (1)..(1297)
  CDS (201)..(1097)
atgtgtgtatgcatgcatgagtgcatgtgtgcatgcatgtatgcacgtatgtatgcacttatgtacgtatctgcacgtatgcgtgcatgtatgtacgtatctgcacgtatgcgtgcatgtatgcacgtatgtatgcatgtatgtgggcatgtatgtatacatgcatgtaggcatgtatgtatacatgcatgtaggcatgtatgcgtgtatgtatgcctccatgtatgcatgtgtgtatacatgtatgtatgtatgcatgtgtatgcatgtgtgtatgcatgtgtatgcatgtatgtatgtatgcaggtgtgtatccatgtgtttatactagtatgtatgcatgtatgcatgtatacgtgtatgtatgcatgtatgcatgtatacgtgtatgtatgcatgtatgcatgtatacgtgtatgtatgcatgtatgcatgtatacgtgtatgtatgcatgtatgcatgtatacgtgtatgtatgcatgtatgcatgtatacgtgtatgtatgcatgtacgtatacatgtgcatgcctgtgtacatgtatgtatacatgtgtgcatgcatgtatgtatgtgtgtatgcatgtgtgtatgcatgcatgtatgcatgcatgtatgtgtgcatgcatgtgtgtatacatgtgtgtatacgtgtctgtgtacatgtatgtatgtatgcacgtgtgtatgtatacatgtaagtatacatgtgtgtatatgtatgtgtgtatttatacgtgtataaacacatatatacatacatatatacgtatataccatatactacatatactatatactacatatactgtatatactatatactacatatactatatatcctatatactatatactacatatactatatatcctatatactacatatactatatatactatatactatatatcctatataggatatactatactatactacactgtatactatatactatactatatatactatatactataaactatatatactatatatactgtatactatatactatatatacgatatatactatatatactatatatactataatatgtatgtactacatatactttatatatactgtatagtatgtgtatactttatatatactgtagagtatgtgtatactttatatatactgtgtacagtatgtgtatactttatatatactgtgtacagtatgtgtatcctttatatatactgtgtacagtatgtgtatactatatactatatatactgtgtacagtatgtgtatactatatactatatatactgtgtacagtatgtg

SEQ ID NO: 2378 - protein, 298 aa, Homo sapiens [sequence omitted]

SEQ ID NO: 2379 - DNA, 1747 bp, Homo sapiens
  source (1)..(1747)
  CDS (201)..(1547)
tcaatttctttatctgtaaaatgcagatactagaacctaactcatcacattattgcaaagcaatgtgtgggaggcacaaggctcaatacaaagaaggagcttggcagtaatagtaatcatgactcttattaccactccagccagagttcagcagcagggaagagcaggtaaatgagaggtgtaaggaaagcacgaagaacatgctatcaggattcatgggtgggaagggggcaggggcggagcatggaaaagcctcaggaggctcctgtttgttcatccttcccttccccttccccttccccttccccttccccttcccctttcccttctccccctccctccctcctttctttcttttctttctttctttctttctttctttctttctttctttctttctttctttcttttctttctttctttctgtctctctctctctttctccctccctcgctcccttccctccttccttccttcctctctttctttcttttctttctttctttctttctttctttctttctttctttctttctttctttctccttttctctccctttcttttctttccctctttctttttttctttttctctttcttcctctctctctttctttctttctttctttctttctttctttctttctttctttctttctttctttctttctttctttctttcttttttttctctttcacagggtcttaagggtcttgctctgttgcccaggctggactgcagtggtgagatcatagctcactgcagcctcaacctcccaggctcaaatgatcttcccacctcagcacccccagtagatgggactataggcatgcaccatcacacctggctaatttttgtatttttggtagagacagggtcttgccatgttgcccagggtggtgtcgaactcctaggctcatgcaattctctcaccttgacctcccaaagtactgggattacaggtgtgagccccacacccagcccctttacactgtttatttttctaatgctcttgtttggggacttttacacttattccagaacatgcagtcagcacccagtgactatctgtggaaggagcgaaccaaggaatgatgtctccagctccagtgctccagagtttcagatgtggctctgtttcatccccatcctggctgctctggttcagagaacttgggtggcagactcactgccagcagtggggagcagcccctgccccacacgggcccagcctcaaggtcccggagtaagcacttcttgctccaagccatcttctagagagatgggagacagggaagctaggagcttctaccaccatctgagtcactgtggatggagagagccgctggagagacaggagtgcaagggcctggcgtggctctgcagctctggagacgtgggacaggccacttgcctttcaggggtgctatggcagagcctaccccgttggccttctcagcagtttgccttatgtctaaagcttcctgggcctgcagcacagggtgctagttttgcctatgggggcagccaaccctctaccaattaggttagagttggtggtgtacaacccattcctcagcgggtcagcctgagacatgtcctccccagccttgcagactgtcccgagggggagtgaaatataaagatgacctatttacgaatccatcctttacatgcttgtctttgttcactgtcttgatatcggtgttcccactgtgcctccacggcctcctgcctcctgtgttc

SEQ ID NO: 2380 - protein, 448 aa, Homo sapiens
MLSGFMGGKGAGAEHGKASGGSCLFILPFPFPFPFPFPFPFPFSPSLPPFFLFFLSFFLSFFLSFFLSFFSFFLSVSLSLSPSLAPFPPSFLPLFLSFLSFFLSFFLSFFLSFFLLFSPFLFFPSFFFSFSLSSSLSFFLSFFLSFFLSFFLSFFLSFFLSFFSLSQGLKGLALLPRLDCSGEIIAHCSLNLPGSNDLPTSAPPVDGTIGMHHHTWLIFVFLVETGSCHVAQGGVELLGSCNSLTLTSQSTGITGVSPTPSPFTLFIFLMLLFGDFYTYSRTCSQHPVTICGRSEPRNDVSSSSAPEFQMWLCFIPILAALVQRTWVADSLPAVGSSPCPTRAQPQGPGVSTSCSKPSSREMGDREARSFYHHLSHCGWREPLERQECKGLAWLCSSGDVGQATCLSGVLWQSLPRWPSQQFALCLKLPGPAAQGASFAYGGSQPSTN

SEQ ID NO: 2381 - DNA, 1672 bp, Homo sapiens
  source (1)..(1672)
  CDS (201)..(1472)
  modified_base (208)..(307): a, t, c, g, unknown or other
ggttacaatgttcatatactatatgtgaggtggcacaatattatttgaaagtaaactgtggtaaattaaagatgtacaggcataccttgttttatagctttgttttatcatgctttgcagacactgtgttctttacaaattgaaggtttgtggcaaaacggcatcaagaaagtccatcagtgaagcctttttccaacagcatgtactnnnnnnnnnnnnnnnnnnnnnnnnnnnnnnnnnnnnnnnnnnnnnnnnnnnnnnnnnnnnnnnnnnnnnnnnnnnnnnnnnnnnnnnnnnnnnnnnnnnnatatatgtgtgtatatgcacgtatatacatatatgtgtgtatatgcacgtatatacataagtgtgtgtatatatgcacgtatatacgtatatgtgtgtgtatatatgcacgtatatacgtatatgtgtgtgtatatatgcacgtatatacgtatatgtgtgtgtatatatgcacgtatatacgtatatgtgtgtgtatatatgcacgtatatacgtatatgtgtgtatatatgcaagtatatacgtatatatgtgtgtgtatatatgcacgtatatacgtatatatgtgtgtatatatgcacgtatatacgtatatgtgtgtatatatgcacatatatgtgtgtgtatatgcacatgtatgtgtgtctatatgcacatgtatacgtgtgtgtctatatgcacatgtatacgtgtgtgtctatatgcacatgtatacgtgtgtgtctatatacacatgtatacgtgtgtatatacacatatatacgtgtgtgtatatacacatatatgtgtgtgtatatacacatatgtgtgtatatacatatatatgtgtgtatatacacatatgtgtgtatatacacatatatacatatatgtgtatatacacatatatacatatatgtgtatatacacatatatacatgtgtgtgtatatacacatatatgtgtgtgtatatacacatatatgtgtgtgtatatacacatatatgtgtgtgtatatacacatatatgtgtgtgtatatacacatatatgtgtgtatatacacatatatgtgtgtgtatatacacatatatacatatatctatgtgtgtatatatacacatatatacatgtctgtgtgtgtatatatatacatatatgtgtatatatacacatacatatatgtgtgtgtatatatgtacacatatacgtatatacatgtgtgtatatatgtgtacatatatatgtgtatatatatgtgtatatatatgtgtatatatgtgtatatatatgtgtgtatatatgtgtatatatgtgtgtgtgtatatatatgtgtatatatgtgtgtgtgtgtatatatatatatatatatatatatatatatatatatctcaaagtcacatagctccagagctccacaggggtacaagtatgagtacgttcactgcagtgtttaactacagatagttggagacaaaatgggtgtctattacagagggatgaacagtaaagcatgtgtccatcttggagtattatgcagcagttagcaggagtggactagatatatacatggaaatatgggtagatatttggtcttagtccttttgggcttctataacaaaacgctataaataggatggctaatatagaacagaaatttatttctt

SEQ ID NO: 2382 - protein, 423 aa, Homo sapiens
  MOD_RES (3)..(36): Variable amino acid
MYXXXXXXXXXXXXXXXXXXXXXXXXXXXXXXXXXXYMCVYARIYIYVCICTYIHKCVYICTYIRICVCIYARIYVYVCVYMHVYTYMCVYICTYIRICVCIYARIYVYVCIYASIYVYMCVYICTYIRIYVCIYARIYVYVCIYAHICVCICTCMCVYMHMYTCVSICTCIRVCLYAHVYVCVYIHMYTCVYTHIYVCVYTHICVCIYTYVCIYIYMCVYTHMCVYTHIYIYVYIHIYTYMCIYTYIHVCVYTHICVCIYTYMCVYIHIYVCVYTHICVCIYTYMCVYTHICVCIYTYIHISMCVYIHIYTCLCVYIYTYMCIYTHTYMCVYICTHIRIYMCVYMCTYICVYICVYICVYMCIYMCVYMCIYVCVYIYVYICVCVYIYIYIYIYIYISQSHIAPELHRGTSMSTFTAVFNYR

SEQ ID NO: 2383 - DNA, 1990 bp, Homo sapiens
  source (1)..(1990)
  CDS (201)..(1790)
ttctgtttatataaattaaaaaactcaagcacttctttttgagtgtagggaacttcctcatgggtcacactctgaacctcacctctgggggcccaccaggactttagttagttataggtctagaaacaaacaggggtgttgggggtggcttctgaggagaatcaacattatctccactggccactgcctcaagagaggccatgactgttgcctcaggaagcacagggtttatctcctcagacaaaggtggaaaggatatatatatacatatatgcatatatacacatacacacacatgtatgcatatatacacatacacacacatgtatgcatatatacacatacacacacgtatgcattatacacatacacacacgtatgcatatatacacatacacacacgtatgcatatatacacatacacacacgtatgcatatatacacatacacacgtatgcatatatacacatacacacacgtatgcatatatacacatatacacacacgtatgcatatatacacatacacacgtatgcatatatacacatatacacacgtatgcatatatacacatatacacacgtatgtatatatacacacatacacacatgtatgtatatacacacatatatacacacgtatacacatatatgtatatacacatgcaaacacatatatgtatatatacacatatatgtatatatacacatgtatacacatatatgtatatatacacatacatacacatatttgtatatatgtatatacacatacatacacatatgtatatatacgtatatacacacatatgtatatatacacatatatacacacatatgtatatatacacatatatacacacatatgtatatatacacatatatacacacatatgtatatatacacatatatacacacatatgtatatatacacatatatacacacatatgtatatatacacatatatacacgtatatgtatatatacacatatatacacatacatacacatatgtatatacacacatatatacacatacatacacatatacgtatatatacacatatacacatacatacacatatacgtatatatacacatatatacacatatgcgtatatacatatatacacatatatacacatatacgtatatatacacatatatacacatatacgtatatatacacatatatacacatatatacacatatatgtatatacacatatatacacatatgtatatatacacatatatacacatatatgtatatatacatatatacacgtatgtatatatacacatatatgtatatatacatatatacacgtatgtatatatacacatatatacacgtatgtatatacatatatacacatatatgtatatatacacatatatacacgtatgtagacacatatatacacatatgtatatatacacatatacacatatgtatatatacacatatacacacatatatgtatatatacacatatacacacatatatgtatatatacacatatacacacatatatgtatatatacacatatacacacatatatgtatatatacacatatacacacatatatgtatatatacacatatacacacatatatgtatatatacacatatacacacatatgtatatatacacatatacacacatatgtatatatacacatatatacacatatgtatatatacacatatatacacatatgtatatatatacatatatacatatatgtatatatacacgatatatttatgttatatatataaactactatatatagtgtatatatagtactactgtataataaactactgtatatatactatatataataaactattttatatatatatagagagagagagagagagagagtagtttattaagtagtattaactcacatgatcatgagatcccacaataggctaccttcaagctgaggagcaaggaagccagtcagagtccc

SEQ ID NO: 2384 - protein, 529 aa, Homo sapiens
MTVASGSTGFISSDKGGKDIYIHICIYTHTHTCMHIYTYTHMYAYIHIHTRMHYTHTHTYAYIHIHTRMHIYTYTHVCIYTHTHVCIYTHTHTYAYIHIYTHVCIYTHTHVCIYTHIHTYAYIHIYTRMYIYTHTHMYVYTHIYTHVYTYMYIHMQTHICIYTHICIYTHVYTYMYIYTYIHIFVYMYIHIHTHMYIYVYTHICIYTHIYTHMYIYTYIHTYVYIHIYTHICIYTHIYTHMYIYTYIHTYVYIHIYTRICIYTHIYTYIHICIYTHIYTYIHIYVYIHIYTYIHIYVYIHIYTHMRIYIYTHIYTYTYIYTYIHIYVYIHIYTHIYTYMYIHIYTHMYIYTYIHIYVYIHIYTYVYIHIYVYIHIYTYVYIHIYTRMYIHIYTYMYIYTYIHVCRHIYTHMYIYTYTHMYIYTYTHIYVYIHIYTHICIYTHIHTYMYIYTYTHIYVYIHIYTHICIYTHIHTYMYIYTYTHICIYTHIHTYVYIHIYTHMYIYTYIHICIYIHIYIYVYIHDIFMLYI

SEQ ID NO: 2385 - DNA, 1309 bp, Homo sapiens
  source (1)..(1309)
  CDS (201)..(1109)
atgtataagcatatatgtatatataagtatgtatgtatacatatatgtatatatgcatatatgtgtgtatatacatatatgcatatatgcgtatacatatatgcatatgtgtgtatatacacatatgtacatatatgtatatgtgtatatatacatatatgtatatataggtatatgtgcatatatacatacatgcatatatgtatgtatatgtacatatatgtatatgtgtatgtacatatatgtacatatgtgtatgtacatatatgtacatatgtgtatgtacatatatgtacatatacatagatgtacttatgaatatatgcacatatgcacatgtatgtatatatgcgtatatacatatatgcacatatgtatatatgcgtatatacatatatgcacatatgtatatatgcgtatatacatatatgcacatatgtatatatgcgtatatacatatatgcacatatgtatatatgcgtatatacacatatacgtatgcgtatatacatatatgcacatatgcgtatatacatagatgtacatatgtatatacgtatatatgtacatatgtatatatgtacatatgtatatgtgtacatgtacacacgtgtatatgtgcatacacacacatgtacacacgtgcatatgtgcatacacacacatgtacacacgtgcatatgtgcatacacacacatgtacacatgtgtatatgtgcatatacacacacatgtacacgtgtatatgcatatacacacacatgtacacacgtgtatatgtgcatatacacacgtgtacacatgtgtatatgtgcatatacacacaatgtacacgtgtatatgtgcatatacacacaatgtacacatgtgtatatgtgcatatatacacacatgtacgtgtgtgcatatatacacacatgcgcacatgtacacatgcacacatgcacacatgtacacatgtgcacatgcacatatgtacacatgtgtatatgcatatatacatatatgtatatatgtacatatgtacgttatatatacatatatgtacatatgtatatatgcgtatatatggatgcatatatacatataagcatatatgcctatatatagatatatgtatagtcttataacttgaggattgcttgaggtctctacatatatcgtatagatatatgctatacatatacatatacacacacacacacacacacacacatatatatgtagagagagagacagagacttggcttgtctcccatgctggagtgcaatggcatgatgacacctcactgcagccttgacctcctggg

SEQ ID NO: 2386 - protein, 302 aa, Homo sapiens
MYVYVHICICVCTYMYICVCTYMYICVCTYMYIYIDVLMNICTYAHVCIYAYIHICTYVYMRIYIYAHMYICVYTYMHICIYAYIHICTYVYMRIYTYTYAYIHICTYAYIHRCTYVYTYICTYVYMYICICVHVHTCICAYTHMYTRAYVHTHTCTHVHMCIHTHVHMCICAYTHTCTRVYAYTHTCTHVYMCIYTRVHMCICAYTHNVHVYMCIYTQCTHVYMCIYTHMYVCAYIHTCAHVHMHTCTHVHMCTCTYVHMCICIYTYMYICTYVRYIYIYVHMYICVYMDAYIHISIYAYI

SEQ ID NO: 2387 - DNA, 1276 bp, Homo sapiens
  source (1)..(1276)
  CDS (201)..(1076)
aatgattgcacatgcacaatggtgacacgtgcctatagtcctaactacttaggaggctgaggtgggaggatcgcttgagcccaggaggtcaaggctgcagtgaggtgtcatcatgccattgcactccagcatgggagacaagccaagtctctgtctctctctctacatatatatgtgtgtgtgtgtgtgtgtgtgtgtatatgtatatgtatagcatatatctatacgatatatgtagagacctcaagcaatcctcaagttataagactatacatatatctatatataggcatatatgcttatatgtatatatgcatccatatatacgcatatatacatatgtacatatatgtatatataacgtacatatgtacatatatacatatatgtatatatgcatatacacatgtgtacatatgtgcatgtgcacatgtgtacatgtgtgcatgtgtgcatgtgtacatgtgcgcatgtgtgtatatatgcacacacgtacatgtgtgtatatatgcacatatacacatgtgtacattgtgtgtatatgcacatatacacgtgtacattgtgtgtatatgcacatatacacatgtgtacacgtgtgtatatgcacatatacacgtgtgtacatgtgtgtgtatatgcatatacacgtgtacatgtgtgtgtatatgcacatatacacatgtgtacatgtgtgtgtatgcacatatgcacgtgtgtacatgtgtgtgtatgcacatatgcacgtgtgtacatgtgtgtgtatgcacatatacacgtgtgtacatgtacacatatacatatgtacatatatacatatgtacatatatacgtatatacatatgtacatctatgtatatacgcatatgtgcatatatgtatatacgcatacgtatatgtgtatatacgcatatatacatatgtgcatatatgtatatacgcatatatacatatgtgcatatatgtatatacgcatatatacatatgtgcatatatgtatatacgcatatatacatatgtgcatatatgtatatacgcatatatacatacatgtgcatatgtgcatatattcataagtacatctatgtatatgtacatatatgtacatacacatatgtacatatatgtacatacacatatgtacatatatgtacatacacatatacatatatgtacatatacatacatatatgcatgtatgtatatatgcacatatacctatatatacatatatgtatatatacacatatacatatatgtacatatgtgtatatac

SEQ ID NO: 2388 - protein, 291 aa, Homo sapiens
MYMYSIYLYDICRDLKQSSSYKTIHISIYRHICLYVYMHPYIRIYTYVHICIYNVHMYIYTYMYICIYTCVHMCMCTCVHVCMCACVHVRMCVYMHTRTCVYICTYTHVYIVCICTYTRVHCVYMHIYTCVHVCICTYTRVYMCVYMHIHVYMCVYMHIYTCVHVCVCTYARVYMCVYAHMHVCTCVCMHIYTCVHVHIYICTYIHMYIYTYIHMYIYVYTHMCIYVYTHTYMCIYAYIHMCIYVYTHIYICAYMYIRIYTYVHICIYAYIHMCIYVYTHIYIHVHMCIYS

SEQ ID NO: 2389 - DNA, 1312 bp, Homo sapiens
  source (1)..(1312)
  CDS (201)..(1112)
  modified_base (925)..(1024): a, t, c, g, unknown or other
cggggattcaccatgttggtcaggctgatctctaactcctgacctcaagtgatccacctgcctcggcctcccaagtggtgggattacaggcatgagcctctgtgcctggcttgggttacattcttgatcttcaaggtcaaactttcatcaaggagattatgaagtatgtgagggattttctgcagtgaggaacggtccagatgattgatttattttttttcttttatctcgggttgttggtttattctgcgaggtcggcttcctcccctttttctataccccatttctgcttctgcgccctcacaattccttctcccccccccccctttttgtttttttatttcatcctctccctttcttttctaccctttttattttttctgcggttcgtatttatttttttgatctctcgttttccctctttcttcttctctttcctcattttttttctttcttttttttttttctttttttaccttatccccctttccccatttccctcatcctttcattctctcccatttttttcctcttcctgttttcttctcttctcttttttctctcctttttttcccccagtttatctcattttcccttatattaatatcctcaatacgcctccttttttccttttttttctcctcccccttttcttattcccaagttctgtatttccctttcccttccctcccacccgttttttttacttccacgccgcgtctctttttttttttttccctcccccgattattttacctctttctgatttttgttcgcttactccttccgtctttatcatcattttctatctccctctttttatatttttgtctcccccttttctctcactccttcctttttcatttcccttatgctctccccttgtttttttatccatttctatctccgcctctgtctccttccnnnnnnnnnnnnnnnnnnnnnnnnnnnnnnnnnnnnnnnnnnnnnnnnnnnnnnnnnnnnnnnnnnnnnnnnnnnnnnnnnnnnnnnnnnnnnnnnnnnncaacaaaaaacataataaatcaggtagcatacagtatttactatttttgcaaaataaattaccatttctttgtttgacaagaaggtaattataatttcaagtgactggaagtgagaaaaacacaggttaccaagaaaaagagacctttgttttagcccaaaattacattcattcttagcagaagcttgcactgccagttttgtgtatagcccacaaacattcttttatttaaaagtagtcttagtgggttggaagataagtacagaactctgctaaataagccaggaa

SEQ ID NO: 2390 - protein, 303 aa, Homo sapiens
  MOD_RES (242)..(275): Variable amino acid
MIDLFFFFYLGLLVYSARSASSPFSIPHFCFCALTIPSPPPPFLFFYFILSLSFLPFLFFLRFVFIFLISRFPSFFFSFLIFFLSFFFFFFYLIPLSPFPSSFHSLPFFSSSCFLLFSFFSPFFPPVYLIFPYINILNTPPFFLFFLLPLFLFPSSVFPFPFPPTRFFYFHAASLFFFFPPPIILPLSDFCSLTPSVFIIIFYLPLFIFLSPPFLSLLPFSFPLCSPLVFLSISISASVSFXXXXXXXXXXXXXXXXXXXXXXXXXXXXXXXXXXNKKHNKSGSIQYLLFLQNKLPFLCLTRR

SEQ ID NO: 2391 - DNA, 12857 bp, Homo sapiens
  source (1)..(12857)
  CDS (201)..(340)
  CDS (11958)..(12657)
cagaatgaaactctgtctcaaaataaataaataaataaataaataaataaataaataaataaataaaacaaaatcagataaaaataaaacaaaattgcagctggattaaaaaggccccagtaagtcaggaaccagggagagagatactgagggggcagcttgctttcaatgatggtcctgcctcaaaagcacacctaccaatgtgccaccccttatctgtcacaccctgtcacctgcagggtgttaggcaaagtgcctcagcaaacgccagcccgtgctgtttgctctggctgtgccctttccttctggcgttccccagccatttcatcctcaattcccagtgagaaccctggacattttgcagcctggggactaaattctaacaggagggtcaatcatagcaatgatgatgatgatgatgaccacgatgatctaatagctaatacttacacagtacacactatgtgccagggagctgttagcagagtttgcataactcagtctcgccacaacccaagaaagcaggcgctactgttatttccatcttatggatggggtaagttgaggcccagactggttatgtcacttgcacaagttacataactggaatctgaaaccagatcacctggctccaaaacctgggctctcaaccaccatcagccatgagccacatcatctgatgacattattccagacccgtatcaacccccaacccttcctgcaggaagatatttcatttgggtccaaaaatacttgcccaatgcctgctccacgccagcccccgcattaggcaaaaacgtggattgtaacggaacaggcaaaacctttgtcctagtagagtcacgctctccccgcctctgcagcactcaggtgagctgcactgtggtttcacaggcccatgcaggtgtgtgtatagctgcaggttttatttccctagcctcacagcctcaagaggagagataaaatgtgtatattcagggatggaaaacacacacacattttctctctcccatcaaggctgtgaggctacggaaataaaacctgctaagaataaatatacggagaagaaaaaacaaagccttggagtcaggccagagtctgagtcccagctctgctgcttggtagctgtgtgaccttgggcaagtcactttgtctctctgtgccttagtttcctcatctgttaagtgggaacaatcagaatacagatactaggaatttaatttttaagttttgggggaggcataacgtcactttactcttctgcttctgcccatgacagaaggaaactgacatttactgagcacctacagtatgcaagactagctgccaggggctttctacatgctcctcatttaatcctgaaaacaaaccctccactgtggcacctgggggtacaatggtgatttaatgaaacctctgtccccaggggtccccattgttcactgccctctcttaggactcaggcataaaatttatccccaatctgtagatgatgaaactgaggctcagaacggttcatgtaaattcactgaaaccaggcattcaggtaatagaggaggagaggttcaagctccaaagccagtatctcctggtatcgctgacatagagtaggcactgataactgcccctcggagactacacggcaacaaagacctatgtacatccatagaaggctctgcagaggatctggtacttcatattgtcacaagagaagtttctggggagccctgcaggcagagaaggagggagatgcttagaatagattcaaacacagcccaggttttttggagaggagcacaacttgttatctctagagggtaactgaaatcagccagtcatgaggagtgcagggagggtgctattacctccacctttacaacatcacctcttccactaccagtgacccagtttgcccttgagaaatcactccgtccacaactttctgtctccggtttctaaagggatgactctacccattataggaccaaagctggagtcatagtaatggaagcggagattgtcatatgacccaacctgagccaatgagaattaggcttgggactttcattgtaactaccaggaaaaagtctttttctgcttcagtttctaaaccagtgggatacaggacagtagctcctaggagctatctttgccacaacataaaaagggcctgcctgtggatggaaccatcacagagggaagcagagccaagagctgaagaaacagagattcccgtcttgagcatctgagcctgaagccactatgactctaagcttctgttatgccaacaattttttttacctgaaccagtctgaagtgggtttctatcacttgcagaaagagttctgatttcttttttttttttttttacacagagcctcgctctgtcgcccaggctggagggcagtggcgcgatctcggctcactgcaagctccacctcccaggttcacgccattctcctgcctcagcctcccgagtagctgggactacaggtgcccgccaccacgcctggctaatgttttgtatttttagtagagacggggtttcaccgtgttagccaggatagtctcgatctctgaccttatgatctgcctgcctcggcctcccaaagtgctgggattacaggcatgagccactgcacccggccgaaagagttctgatttctaaagtgacccagctgaaccaagagccaaactgggattcagtatctggctgtttgctaagtaggtgatgcctcaaggattctccctgcatgggaatttgtggcaacttttttggctgaaagaggcaagaggagtaaggtaccagcattgctggataaatccaggactgctgaagggagtgttgtacgctcttgcaatgaacagaatggaagaatatcggcatatttattctcagcacatcccaaaggacatccagaaaaatccagggagactggggtgggggaaacatagccgaagtcctctagttagacatgtgaactccaaatatgagagacaggtctcagttaatttagaaagtttattttgccaaggttgaggatgtgcgcccacggtaccgcctcaggaggctctgacgacatgtgcccacggtggtcagagcagtttggttttatacattttagggagatatgagacaccaatcaccgatcaatgtatgtaagatgagcattggtactgttcagaaaggcaagacaacttgaagtggggaggaggcttccaggtcataggtagataagagacaaacagttgcattcttttgagtttctgatgagcgtctccaaagggggcaatcagatatgcatttatctcagtgagcagaggggagactttcaataaaatgggaggcaggtttgccttaagctgttcccagcttgacttttccctttagcttagtggtttggggccctgagatttactttccttttacaggcacatggaggcattgaatactgaagtgtcccactttgtgccctcaggttggtgaggcttacagttgctcaggttacatgagaatagggtcacataaacagctgtcccactgtgggcttggttttctgcaaggtactgagttccccattatgccaggtgtgtaagcagacgctgtaacaggagagagggcagtaagttatggcagcattttttttcttttttcttttctttcttttttttctttttgagatggagttttgctgttgttgcccaggctgaagtgcaatggcgtgaccttggctcaccacaacctccgcctcccaggttcaagcgattctcctgcctcagcctcccgagtagctggtattacaggcatgcgccaccacacccagctaattttgtaggttacagcagcatttctcactggtccatggaccatcagcctaacagttacttgcagttgctccaacatgtgtattcctgggccctgcacagacttaatcagaacttctgtgaagtagtctaggagctggcatgttttgctacctagcccaggggattctgatgcacaataagagaatatccggtaacattagcacttctcaatcttaaaagtacacacatggtcttgggactacgttaaacacaaattctgattcagaaggtttggtataagagactgaccatctgcccggtgctgatgctggttcacaggccacagtctgaggagccaggagcttagatgatgacttcaacaatgtaatgccagccctcacaccgtacactcctatggctgaagactggaccacacactggtacagaagaccagcaaggacaatagggttccattctaccaggcaaggccaggaggaaacaaaaccagtctcatgaactggctgaatagttccaaagagacaaaagctctatgggcaaagagagagatgcgcctgagatttaagtttacatgataaaatggtaactgttatttactgaacagtactgtgtgcaggtggcatattctggccactttaaaccattatctgagctggcatttaccatagccatataaagtaagcaccagaatctccactgtgtggaggagcaaactgagatgaatgtggttgacattaaataatatttgagattattctgccttctaggctcatggtagggctgcacttcctggctccttgtggatggggccaatgagctgtgggtgggtatgacatgctaattttgggtggggcccttttattgtgggttcaagcccctccaatgctacctttccctgtcactgtgactggcaacattcaaatgatggctgctccaacagctggaccctttggtgtggaaaaaacagagcctcaccatttgacctatgagagacacacagcatgcatgataaataaaatttgttgtaaaaagctgagttttaggactgtttgttactgcaccatataaccttgtatagcctgactaatacacataagtttcaacagctaggatttcacaaggccaggatttaacctagatctggttgactccatagtctatgttcactcaattcaatgtagggaaagatactggcatccacaaatctcagccgaaccactctgtcaacagaatgagaaggacgatttccaggagctgggctgacataggaatgagaggttactcatggagacatccatcagatcctgggggactgtggtgagtagaacaagagccctggtcaagcctatgtgggtcacagaaacctcatcccagagcaagcagctcatccccaggccagcacagggatagggaaagaccctggaggtgacagcagaaaacagcagccccaattatagtctgacccaggctattgagcccacctgacccaatgaaagccaccaccaaaatctgggggctccaacagataggcagaactgatgacaactgaagagagaggaagagaacagagagagacaacagccaagaaaacaggccctatcccagagcaggccaagcctcaccatgttgtcacttagtcatgctcaaaggatgctacaggaaggaaggggcacctgctgggtgcttctgtagaagaggcaggcctcatggggtacgatgaaagggagcctgactcaacagatgaggcagggcacccatgggcaagagacccagtggagccgctgctaatgaaagaaaagggtacttgcactatccatggttctgaggctaaagctgctccaccaagtgggtctcaaacatattagtgacaatagctgtcgctttgtactgagtgcaggtaccatcattatacccttttccagattaggaagctgagacatggagagtttaaacaacacgcccaaggccacccaactaacaagtggtggagccaagatcccagctcaggggatttgactcttcttctgagactgagtcttgctccgttgtccaggctggaatgcagtggtgcaatcatggctcactgcagccttgacctcccaggatcaagcaatcctccctccccagtctcctgagtagctgggactacaagtgtgcatcaccacacccagctattttttctgtatttttttgtaaagacagggtttcactgtgttgcccaagctggtctcaaactcttgggctgaagtgatcctcctgctttgacctcacaaagcactgggattacagcgtgagccactgagcctggctcagggatgcgactctgatcttactcttcctccctcagctgttttcccataggctcttgtggctacacaacatctgctctgtcctcaagtggggtgattctgtcgatgtctggagagactttggtttgccatgccttgtggattaactaggtgctactggtgtctagtaggtggaggtcagggaggcttctaaacactctataatacaccagacagccctcaacacaaggaatgatttggcctcaaatgtcaacagtgctgaggctgagaaaaccaatgttagaccagcactatccaacagaaatacaatcaagtggtcaaggcccggtagctcacatctgtaatcccagaactttgggacgccaaggcagggggattgcttgagcccaggagtttgagtttagcctgagtaacacaacaagaccttctacaagaaatcaaaaaattagctgggcatggttacacatgctgtggtcccaagtacccaggatgctgaggtgggaggatcgattgagcccaggaggtcaaggctgcagtgagccatgatctcaccactgcactccagcctgggcaccgaggccacactacccataggctgctcccagccagaagcgagcatgctaggtaatagtgccacctgttcctgcaggcaagagagtcctctaatagtcaacagtccaccagagactcccaactgatctggccaaatgttcctagagctgtgtgttgtgtctcagactcctcctgcccaacttcttccttcacctctccccttcatcagctggcttactgttcacttcaaggtcaagacattggctgtctgatgcagggacatccctggcacggcctccatggtcatctagcaaggggagggtggagcaaaggcttggtcccatagcatatattcacccatctccttgtccatttgttgtcttccagcagaatgtaagctctgagaaggtaagcagtttcctctcctttcctacaactgctgtcttccttgtatctagcacagtggctggcacaggctaggtgctcagtaaatatctggtgaatgaacccaggtcccctgaattctctgcttcatttcacaaagctgatctgagcacctattaggtctacaagctgtggcaggtattggggataagatctgagcaagacaggacccttgccttcaaggcactgagttctcaaaggcaagatggtagctatacagctaggcacagaattgtgtgactacagactatggccacagagctcctccttgctgacagctggtgggagctggtgttggctttgtttactgagcatccctacaaagggatttggggcttatgtaatctgaactcaaccagaaggtcagagaaggcttcagaccaaagtttaagataaagaggctgaggcaaggctccagtcccagagcatccccaggaggcctaccctgttcttccatgaatgtctcttgattagaaactctagagtctaggaggtcaaggtgggaggatcacttgaagccaggagttcaagaccagcctggacaacaaagcaagacctcatctctataaaaaataaaaattaaaaataactaaaaataaaatgagagacagagagagagagagagagagagagagagaacagaccagcctaggcaacatggtgaaaccctgtctctacaaaacatacaaaaattagctgggtgtggtggtgtgcacctgtggtcccagctactcgggaggctgaggtgggagagtcacttgagcctgtgaggcagaggttgcagtgagcagggatcgtaccactgcactccaagtctaggtgacagagcaagaccctgtctcaaaagagagagagagagattgtgagaaacagcagagtctgactggagctgaattattgagctcagcctgggaccaactgtcccacccactgaccagcactgaggacagagggtaaaccctgcaaaggaagtgatcagcttagagaacatttttcatcactccaagacctgatgttaaccacactgaggcttcacattacacagaacacaatgacaatgttctggttatgtttcttgaaaagagtttttttttttttagagatacacattaaaatatttacagatgaaatcatataatgtctgcacgttgcttcagaataatattacaggggagaagggataggctgattcaggccattagggcctggtgaaggtacccgagttctgtctatctttaggttaaaactttttcatcataaaaggtttcctgaaaaaagcaagaaaatgtaaaaatatatatatatagattacatgtggacttggagcagccaacaccattgcttcctgtccccaccagcagccaagactcctcaagctgaaatactggggtcggccacacctttgcaccacagcttcctttgttcttcctgaagtctttcctaattgtgctggaatgcaggcattgcagcagggaatcccctgttccaaagcctttgctggattttttttttttgaggcggagtctcgctttgtcgcccaggctggagtgcagtggcgccatctcggctcactgcgagctccgcctcctgggttctcgccattctcctgcctcagcctcctgagtagctgagcctacaggcgcccgccaccacgcccggctaatttttttgtatttttagtagagacggggttttaccgtgttagccaggatggtctcgatctcctgacctcgtgatccgcccaccttggcctcccaaagtgctgggattacaggcgtgagccaccgtgcccggccactggatcttataaatcacaggatttcagaggagatgcggccctggatcagatactaacatcttatgtcttcccttgagtgctgggaaaggggaggttggagactggggaacattttgccatttgcagtcttaggagatctttgtaaagatttctccctctggctggttttgaccaggatattgccaaattccacgtcttggtttctggatcctcccgagcctttgagtttcccgtgaggccacagctgtagggaggctgagccaagtggccataacaaccaggcagagtagcaggaagaagcaggggcagggtacaagcctccccctcaggaggggaacttccctgtgccaaggggaatgaagggacccaggagatgcacagcagacccagtgccctacctctttttatagtccaggtcccccacagacccctttatcagctggcttactgttcactccaaggtcacgacagtggctgtctgatgcagggacagaaatccctggcacagcctccatgttgtccctctgcagagacaggaggactcaggcctggccatgatgctggagtcaccgtggatataggccctggcccatttgactcaagaacacatacataactggaaccaagaggctggcgaatcctctcaagaccctggccacttggaagaccctaagcctccttgcaggtggccatactaagcaaagtcacttgcagccacccttccacgatgcgttctacatcacccagctgtgaaaaccacccacccccatccccatccccttcacactcatgccttcctcctgagctcaaggggccctggcccaaggttcctttagaaccaggaaggaggttttgtccctctgaaaatcatccttttcaaacagaaggcatttatcttggccaggcttaaaagacaaaaagatgatagctgagctctagggcccatcccacagacaatatccagaaaccttctccccacaattcccacaccagcctcccagcagctggatcttttctccacgggatttgcctacaagacttctctccggctttatctcaggcgggtttgtcaggggagcaatgtcaccatccctccaccaaattcacctcaacaacatttactgagcaccaagtgtgtccccaccgtggctcagccttcccacgcactgtcctgatttaaccccacgtgcttataacccaagggagaatcactgcgatattttatcaatgtaaagacacacatcttaattgttcatattttcatgcacctgaaatttgggtaggtcttctaattacaactgtgacatggctgtcccgcctggtcccatacagactcagtcacagcagttcatagcattgtcactttaattaagttttgggcatggttgttacttcaaatgtggagtgtaggtgctattttaaatgtcttcaaaaagattcaactgtgattcagctttgaattgaaaagctattgtgcacacaggaagcctgggaacagagcagcagaatgcctgtgcgatgctggcgaggcagacacatattcatccctgcagacaggcccacaagtccagattttcttgcaaagcaccaaccaaatacttaaaaacttaaaatgggacttaaaaaccatcccaggctgggcacagtggctcacaactgtaattccacagctttgggaggccttcaggattactgaagcccaggagttggagaccagcctggacaacatggtgagacccccatctctacaaaaaaaaaaaaaaaaagaaaaaaaagaaaaaacttaaaaattacctggacatggttgtatgtgtctgtagtcccagctactcaggaggctgcggtgggaggatcgtttgagcctgggagttccaggctgcagaaagctacgattgtgccattgcattccagcctgagcaccaatgagatcccatctcaaaaacaaaacaaaacatccccgggatgagtggacacacttgcaagaaatgcctcacttcctgtgcttctcgattaggggccaccaaatgtttcatgcaaagggtgatagggaatatttttggtttgtaagctacacaggctcagctgcaaccactcaactctgccatcagggcctgaaagcagtcatagggttgtaactatgctccaacaaaacttttttttttttttttttttgagacggagtctcgctttgtcacccaggctagagtgcagtggtgcgatctcggctcactgcaacctccgcctcctaggttcacgccattctcctgcctcagcctcccgagtagctgagactacaggtgcccaccaccgcaccaggttaatttttaaaatatttttagtagagacggggtttcactgtgttagctaggctggtcttgatctcctgacctcgtgatctgccggcctcagcctcccaaagtgctgggattacaggcatgagcctccgcgcccagccccaacaaaactttatttgcaaaaacaagtggaggaccacatttggttcatgggtggtagtttgctgtccctttctcttgatagaacagaaaacaatgtggaaaaatgagggcactgatgattttaagtcaaaagtgatacagaagatgaactttgaactaaaaaaaaagttttaagaatatcttacttcaatgatattttatctgtgtgtacttacaaaagtgatgtgtgattaaaaaaccaaacaaggggactgccatcagcaacagccccaaagcccactgggctccttggtgggttgtgagttcagcagcctcagcagggtgcatcagtcgagcacagctaggactccccacaacatgcgtgtcccaggctggcactgagacacagcgctgatgttgctgccgggggctgctgatggcactggtgctggtgctggggtggctgctatgggtgagggggcgtcaaggaagagcacagtagtgtgtagatgtgaaccagggtccccaggtggtcgccctttgaatgggccaatgtccaagacctgtacatgattgtgctctgcatccttgcagccagcctggccaagactggttctacctgtcccacaaggtcaccagcatagtccctgagagcaccctgctcatcatcctgggcctggtgctgggcagcatcatctgggtggccaaacacataacatccttcatgatgatgtccctcatcatgctagatgccagctacttcatccccagctggctcttcttcggcaacctgggcaccatcctgctgtacaaggtcatcagcaccatgtggaatgcatccaccaccatcctgtccctctatgacgtctctcttagtaggctcatgggctacctgcagatagggctgctggacttcctcctgttcggcagcctgatcaccactgtggacccagcagctgtcctggttgtgtttgaggaggttcatggcaatgaggtcctgttcatcatcatcttcagggagttgctactgaatgactctgtcatcatggttctgtacaatgtgtttcaatcttttgtgacactgggtggtgacaacgtgaccagcatgaactctgtggaaggtgtagtctccttccttgtggtgagcctggggggcatgctggtgggaatggtctttgcctttctgttgtcactggtgacccacctcaccaagcatgtgcacatcatcgagcctggtttcatgttggtcatctcctacctgtccattctgatgtctgagaagctgttgctgtaggccatcctggccatcatcttctgtggcatctgctgccataagtacatgaaggccaacatctcagagcagttggcccccaccatgtgctacaccatgaagatgctgaccagtggcaccaatcccatcttcatgtccctgggcaccttagccatgaacctgctcatctggacgtggaacaaggcattcatccgcctgcactg

SEQ ID NO: 2392 - protein, 279 aa, Homo sapiens
MCHPLSVTPCHLQGVRQSASANASPCCLLWLCPFLLAFPSHFILNSHQPGQDWFYLSHKVTSIVPESTLLIILGLVLGSIIWVAKHITSFMMMSLIMLDASYFIPSWLFFGNLGTILLYKVISTMWNASTTILSLYDVSLSRLMGYLQIGLLDFLLFGSLITTVDPAAVLVVFEEVHGNEVLFIIIFRELLLNDSVIMVLYNVFQSFVTLGGDNVTSMNSVEGVVSFLVVSLGGMLVGMVFAFLLSLVTHLTKHVHIIEPGFMLVISYLSILMSEKLLL

SEQ ID NO: 2393 - DNA, 4501 bp, Homo sapiens
  source (1)..(4501)
  CDS (201)..(392)
  CDS (899)..(1180)
  CDS (1571)..(1763)
  CDS (1811)..(2016)
  CDS (2094)..(2265)
  CDS (2556)..(2787)
  CDS (2895)..(3033)
  CDS (3110)..(3347)
  CDS (3602)..(3904)
  CDS (4045)..(4301)
  modified_base (2859): a, t, c, g, unknown or other
gaatggttaacccaggcatctccagcagccaatcacagagctctgcaggaatacctgggagaggtcctcatgcagcccgggcgggtcctagcccagccccagtctggccctggacaaccccagcaaagccgccctcagccagcccagaagcactgggccttggccacagcaacacccactgagcacgctgggagctgagtatggcgtccctggtctcgctggagctggggctgcttctggctgtgctggtggtgacggcgacggcgtccccgcctgctggtctgctgagcctgctcacctctggccagggcgctctggatcaagaggctctgggcggcctgttaaatacgctggcggaccgtgtgcactgcgccaacgggccgtgtggaaaggtaacagccccacccgacgggtcccccagccctggcctcttcccgccagctccgccctgccagccggcagcaaagggccctgggcaaactccaggaggcggaggaggctagtggcagtacctgggcaccctgaccctccccacaggccagagcccaccctcctgctcatgagggcagacaggcctttccagggacacagtccctcttctccccaggaccccagggccaactccccctgccggccctctgccatcaaattggcagtggctccaggggagtcccctggggatgggggaccactgttggggacccctctgcgtgcacccctgtagttggggaagcaggacaggggcctggggagacggaagggcgccaggggttgagagaggatggtggacgttgttggacttgaaagggaaacaggccctcggggaagcccctggccaggcctgcctctcccctccctggtgggcccagcgcccctgctcacttgtctctgcccacagtgcctgtctgtggaggacgccctgggcctgggcgagcctgaggggtcagggctgcccccgggcccggtcctggaggccaggtacgtcgcccgcctcagtgccgccgccgtcctgtacctcagcaaccccgagggcacctgtgaggacgctcgggctggcctctgggcctctcatgcagaccacctcctggccctgctcgagagccccaaggccctgaccccgggcctgagctggctgctgcagaggatgcaggcccgggctgccggccagacccccaagatggtgagggagagtccaggcagaccaggggagtgggtgaggagggtcccacggcccatgggacccggcctggctgcaaagccttcggggagcctgggggcctggggagacgcccaggagtcggcctgcggctggggattcacaacgtggggctcactactgggcagttgggagcctgtaggagccccgggagggacctcatgagggaggaacccagaggcctgagtgggagcctgaagcagctgggcccggcagggagggctgtggctccagggaggggcggggctggtgggggcagatcctgtagttggggtgggagatgcatccaggggcagcggggtggatggcagaaggtcacaccaaaggctgaggcggaggccccctcttccccaggcctgcgtagatatccctcagctgctggaggaggcggtgggggcgggggctccgggcagtgctggcggcgtcctggctgccctgctggaccatgtcaggagcgggtcttgcttccacgccttgccgagccctcagtacttcgtggactttgtgttccagcagcacagcagcgaggtccctatgacgctggccggtgaggcctgggctgggctgtggaggggggcacccccgagtccccagcctccacgtccctggggggcagggccggagcccacacagactcgcggtgccaactcttctccctgccagagctgtcagccttgatgcagcgcctgggggtgggcagggaggcccacagtgaccacagtcatcggcacaggggagccagcagccgggaccctgtgcccctcatcagctccagcaacagctccagtgtgtgggacacggtgagctgcgccctggggtaagatggggcctcaccggggtctgcttgggcccctgagcctgtcctgccaccccccaggtatgcctgagtgccagggacgtgatggctgcatatggactgtcggaacaggctggggtgaccccggaggcctgggcccaactgagccctgccctgctccaacagcagctgagtggagcctgcacctcccagtccaggccccccgtccaggaccagctcagccagtcagagagtgagtgcccacgccgacattgtgctggcagcacagaggtggagcccgtgtaggaaggaaggagtggctgcccaggatgagggatggagagagtgagcaggggctggaagtagaaacaacagacacaggggaaggtggcgtcgccaggagagtggggctttgaggcaggagggtcagcctgagtgagggcctggcccacactgacggcctgcagctctggtgagcagcgcccgggaagcaggggctgagtctggaagaaaagctctcacagccgcctcacccgcccccagggtatctgtacggctccctggccacgctgctcatctgcctctgcgcggtctttggcctcctgctgctgacctgcactggctgcaggggggtcacccactacatcctgcagaccttcctgagcctggcagtgggtgcagtcactggggacgctgtcctgcatctgacgcccaaggtctgcccccacaaacccgcgaccctggccctccgttccccaccatggactcccaggccgtgccctcccagggaccttacccaccccacctcctgacccctctccctgggtcttggtgggaggcgccctgngacctcccccccagcccagcgcccctactccccaggtgctggggctgcatacacacagcgaagagggcctcagcccacagcccacctggcgccctcctggctatgctggccgggctctacgccttcttcctgtttgagaacctcttcaatctccggcagcccagggacccggaggtcaggcttcttgggaaggtacccggcgggtgggtgtgctgggggcctggtggacactgagcacctaccctcacaggacctggaggacgggccctgcggccacagcagccatagccacgggggccacagccacggtgtgtccctgcagctggcacccagcgagctccggcagcccaagcccccccacgagggctcccgcgcagacctggtgagtgggcgccagatgccccatcccacgcggagcccctcccaccgaccccttcccacgcccacactcccagccccaccccaggcctgcggctccgcctcccgcggtgatctggggccccgccccgccccaccgcgttcctcctccacttccgggcgggacttactcaaggctcctcccaggtggcggaggagagcccggagctgctgaaccctgagcccaggagactgagcccaggtgagcccagggggcgaccccggaagggctgggggatctggggtttgtgtggagcgcgggtggggcccaaggcttggcggtaggcgacaggccacgcgaacccacgggcctctgcgcccgcagagttgaggctactgccctatatgatcactctgggcgacgccgtgcacaacttcgccgacgggctggccgtgggcgccgccttcgcgtcctcctggaagaccgggctggccacctcgctggccgtgttctgccacgagttgccacacgagctgggtgagcgcaggcggggcctggaaggagatgggcggggccgcacggggctgggaggggagacctggaacaggtgggcggggcctggaagatgggcggggccgcacctggctgggtggggagaccggaaacaggtggggcggggcctggaaggtgatgggcgggatctgacggctgggcggggagaccgggaacaggtgggcggggcctggtggtaagagggcgggaccgaaaggaggtgggcggggcatgtagctaggagggcggagctgttaatgtggactcgcccgcaggggacttcgccgccttgctgcacgcggggctgtccgtgcgccaagcactgctgctgaacctggcctccgcgctcacggccttcgctggtctctacgtggcactcgcggttggagtcagcgaggagagcgaggcctggatcctggcagtggccaccggcctgttcctctacgtagcactctgcgacatggtcaggatggcgaggggaggggctgctctgggccgggagctgagcagaggagctgagcaggggcgctgacccggtgcccacttgctcctcagctcccggcgatgttgaaagtacgggacccgcggccctggctcctcttcctgctgcacaacgtgggcctgctgggcggctggaccgtcctgctgctgctgtccctgtacgaggatgacatcaccttctgataccctgccctagtcccccacctttgacttaagatcccacacctcaca

SEQ ID NO: 2394 - protein, 737 aa, Homo sapiens [sequence omitted]

SEQ ID NO: 2395 - DNA, 28066 bp, Homo sapiens
  source (1)..(28066)
  CDS (201)..(484)
  CDS (1612)..(1795)
  CDS (3747)..(3927)
  CDS (4080)..(4249)
  CDS (4483)..(4627)
  CDS (5505)..(5669)
  CDS (5854)..(5934)
  CDS (6073)..(6263)
  CDS (6511)..(6636)
  CDS (11049)..(11227)
  CDS (16901)..(17396)
  CDS (22082)..(22252)
  CDS (22787)..(22988)
  CDS (23237)..(23324)
  CDS (23401)..(23518)
  CDS (25414)..(25676)
  CDS (26212)..(26357)
  CDS (26574)..(26656)
  CDS (26876)..(26958)
  CDS (27133)..(27224)
  CDS (27616)..(27866)
  modified_base (9246)..(9345): a, t, c, g, unknown or other
  modified_base (21312): a, t, c, g, unknown or other
  modified_base (21523): a, t, c, g, unknown or other
  modified_base (21534)..(21633): a, t, c, g, unknown or other
agaaagaaggctgcagtaggggctgctgctggactcggtggggagcaggtgcaaggagctctggctcccccatggacctgagctggagagcagagcgcagctccagcccattcctcattcttccagggcacagtcctcaggatgtttcggggagaataggagccagaacctgagcccctaagctattcccctcaccaatgatggggtccccagtgagtcatctgctggccggcttctgtgtgtgggtcgtcttgggctgggtagggggctcagtccccaacctgggccctgctgagcaggagcagaaccattacctggcccagctgtttggcctgtacggcgagaatgggacgctgactgcagggggcttggcgcggcttctccacagcctggggctaggccgagttcaggggcttcgcctgggacagcatgggcctctgactggacgggctgcatccccagctgcagacaattccacacacaggtactgaccccttcctccactccacagggccacatctcccaggtcctctcagtgcttgcccccagttgcctcgttctggcttcctcacgagatccctggagttacaaattcttcagaaccgagctccttggtatctcttcaaaacctctcatgcttctattgccttctctctcttttcttgagactgggggtctcgctttgtcacccaggctaaagtgcagtgacacattcacggctcactgcaacctctgcttcccaggctgaagccatcctcccacctcagcctcctgagcagctgggaccataggcacacaccaccacagccggctaattttaaaaattttttacagagacaagggtttcgctgtgttgcccaggctggtctcaaactcctgggctcagctcagcgatctgcctgcctcagcttcccaaagtgctgggactacagatgtgaactaccaccctagccctccgttgccttctaattctctcctcctccaaatctctaagcccttaaatttcttgctcttagtatcactgttcagtgtctctgggctgatttggctccaaattcgtagacttcttttttcttttcttttcttttttttttttttttttttttgagacagagtctcgctctgtcgcccaggctggagtgcagtggtgtgatcttggctcactgtaacctctgcctccccggttcaagcgattctcctgcctcggcctcctgagtagctgggattacaggcacacaccaccacgccgggctaatttttgcaattttagtagagacggggtttcaccattttggtcaggctggtctcgaacttccaacctcaggtgatccacccacctcagcctcccaaagtgctgggattacaggcgtgagccaccgtgcccagccattcgtagcccttttggttgtcgtccttttttttctgtcccccccagtggcagaaaatggacaactcacagatcttcctaagaatgacattccatggtttctgggtcccaggatctccagtcagtggctagtccccccattccccctaaaatccctgggagcctctcaaagcgggttgatagagaacacaagggaggctgacttgctgtctcatccattccaggccacagaaccctgagctgagtgtggatgtctgggcagggatgcctctgggtccctcagggtggggtgacctggaagagtcaaaggcccctcacctaccccgtgggccagccccctcgggcctggacctccttcacaggcttctgttgctggaccactcattggctgaccacctgaatgaggatgtgagtctgacggtctctagaggggaaggagccatgggattagatggcctgaaatgtttaaataatcagtagttttttgttttgttttgtttttaaatcccaacgtggaccaagcgtggtggctcacgcctgtaatcccaacactttgggaggccgaggtgggtggatcacctgaggtcaggagttcgagaccagcctggccaacatggtgaaaccccatctctactaaaaaatacaaaaattagccgggtgtggtaacaggtgtgtgtaatcctagctactcaggaggctgaggtgagaaaattgcttgaacttgggaggcagaggttgcagtgagcccagatggccccctttgcactccagcctggggaacaaggggggggctctgtccccaaaaaaaaaaaaaaaaaaaaaaaaaaaaaaaaaaaatagctgggcgtggtggcacatgcctataatcccagttactcggaaggctgaggcaggaaaatcacttgaacccaggaggcggagattgcagtcagccgagattgcaccactgcactccagcctgggtaacacagcgagactctgtctcaaaaatgaaaataaaaaaaataaaaaaataaaaaaaaaatatctcactgtggtcttaggggatgttatttcaatagtgaactatgttccctctgggatcagagcaggtgagcccatatccagagctccaagactcagtttaggggaatagatggcaaagcagagaatctagagaagcagcccagggtaggatctggatggtcacctggagaggagacctgcagggaatggatggctgtcttcatccagaaagacagagaatatattccacttacaccagagggcagacaaagctgcctaaccctgatggaggtccagtgagtgcccattgcaggaagcattcaagctgaggctggatgaacatcgacagggctgttgagagggagattagatggcatttcagggtcttttcccttttaagattctggcatggagagctctagttttccaaccagcttcatttatcaaatcaacaaaatgattgaaatgatcagagtttgcagggaagatgatgacaatgctcactagcacccagtttgcatcaaattgaatacctgcattggactgaatattcactaataatacacattgattataagtacccttggccctagtccccaaggtacctgccagtaggagcaaaggggaccctgggagagacccaggagtctatgcaatggaaggacaggtgttaaatatatatatatatatttttttgaggtagagtctgactctgtcacccaggctggagtgcaatggcgtgatcttggctcactgcaacctccacctcctgggttaaagcaattctcctgcctcagcctcccgagtagctgggattataggtgttcactactatccccagctaattttttttttttttttttgagatggagtctcactctgtcgcccaggctggagtgcactggtgcaatctcggctcactgcaacctctgcctcctgggttcaagcgattctcctgtctcagcctcctgagtagctgggatcacaggtgcacgccaccatgcccagctaattttttgtattttagtagagacagggtttcaccatgttgcccaggctggtctcgaactcctgagctcaggcaatctacccacctcagcctcccaaagtgctgggattacaggcgtgagccaccgcacccggctcatccccagctaatttttgtatttttagtagagacagggtttcactatgttggccaggttggtctcaaactcctgacctcagatgatacacccgcctgggcctctcaagggctgggattataggtgtgagccactacacctggccaggtgttaaagatctgagtcatagttcctggtgattctccaatgtatgaccctcaattctccagtgtctgaacggctcccagctgctggtcaattttggcttgagccccgctgctcctctgacccctcgtcagtttgctctgctgtgcccagccctgctttatcagatcgacagccgcgtctgcatcggcgctccggcccctgcacccccaggggatctactatctggtcagcaagtaggagtgggtgggggacaccctgaatcctggaagtggggcccatgccaaaaaggaggctcactggggtcctgcctctccttgtagtgttctctctgctccaccttacgtgtgggaccctcctcttgccctgacctaacttcagcccctgattctccccagccctgcttcagagtgccctggcagtcctgttgctcagcctcccttctcccctatccctgctgctgctgcggctcctgggacctcgtctactacggcccttgctgggcttcctgggggccctggcggtgggcactctttgtggggatgcactgctacatctgctaccgcatgtatgtgaagccccttccttgtacccctggcctccatggatctaaggtgtccccagccataggacatcccctccgcctttccatcagctcccatatcctactcccagatcctggcttcagcccacagctgccttctagtagagcatatgagcgaaggcttgccacaatccatgcaaggggatgttgttgggtataggggcttccagagtctgccctgaccttctctctgtcaggcacaagaagggcggcacgcaggacctggcggactaccagagaaggacctgggcccggggctgtcagtgctcggaggcctcttcctgctctttgtgctggagaacatgctggggcttttgcggcaccgagggctcaggccagtgagtgatacccttttctcctccttctgctgagaccagagtcccagtcaagaactgggccaggccgggcgcggtggctcacgcctgtaatcccagcactttgggagcccaaggcgggcagatcacaaggttaggagttcgagtccagcctgaccaacatggtgaaaccctgtctctactaaaaatacaaaaattagctgggcgtggtggtgcgtgtctgtaatcccagctactcaggaggctgaggcaggagaatcgcttgacttgggaggtggaggttgcagcgagctaagatggcaccactgcactccagcccaggtgacagagcgagactccatctcaaaaacaacaacaacaacaacaaaactgggccaaaaagccaagagatgaggagcagtgtgtgctcctggatctctgacatttgcctggtgtgcaggacctatcggctaacagggagtgggtaggggctccttaagcacagacccaggacttctggccaaatggcatcctattctgagctcaagtcaacaagaaacagaggggaggtgccaacttgggaagaaggtagaggccaaagaacatcccaggtgccagaggtggaaccaggtgttcatcttcccagcttgtggcctggcttccccttagtccctggctctgctgcctcctccaccaggagggatgccctcctatttcagagatgctgcaggcgaaaacgaaggaatctcgaaacacgcaacttggatccggagaatggcagtgggatggcccttcagcccctacaggcagctccaggtgactagaggagaaaatttgaagagtaggttccaagctcacagtccttacttgcagccaccaacactgtcctgtgcttcttcccgcagagccaggggctcagggccagagggagaagaacagccagcacccaccagctctggcccctcctgggcaccaaggccacagtcatgggcaccagggtggcactgatatcacgtggatggtcctcctgggagatggtctacacaacctcactgatgggctggccataggtgtgaggggtgggaacggagggaagcaggtccgaggggaggccagggctcctagttatcagctggggctaggagagggccgtcaggaagatggggagaggacgggaggaccacggaacacaggaacctgcttctgaggagacttttcttctggactgacaacttccgaccctgctggccccaggtgctgccttctctgatggcttctccagcggcctcagtaccaccttagcggtcttctgccatgagctgccccacgagctgggtaggaatggcaggagcagggtggggtggactccagaaaggagatagctccaaggggtagagcttggaggctggtgggtggcatggatgaggggcaccccagcttactccctcccatcctgtcctctgtctccaataggtgactttgccatgctgctccagtcagggctgtcctttcggcggctgctgctgctgagcctcgtgtctggagccctgggattggggggtgcagtcctgggggtggggctcagcctgggccctgtccccctcactccctgggtgtttggggtcactgctggggtcttcctctatgtggcccttgtggacatggtgagagatgtcgggtagagcagagaaatcaagggcagtggggaggcgggagtggagagggaggtagcagtccctccgcctctaccattagctcctggaagggcgtcagaccataggcccgcaaaagtctgagaaacaagggactaaggtgtttgggtgggggctgctgatgctttctgacaccattcctctggagttgagaggtcaggggcaaggccagaatcctgacatcctctttttctttcagctaccagccctgcttcgtcctccggagcccctgcctacgccccatgtgctcctgcaggggctggggctgctgctggggggcggcctcatgcttgccataaccctgctggaggagcggctactgcccgtgaccactgagggctgatggggccagtggaaaggggtcgggttgcccttccttccccccaaccacaggaatggaggcgggacacagggccagtaggagcaataggattttaataaacagaacccatcccaaagccatgactacgacagttgtacttgcaccaaaacagcatagaaaaccagagtgtggtgggaggacccgaagccggttgggggaggatgtgagtaggggcctggagggtgcagggtcattaatctgcggggagaacattgtgctttagcccagggaggggaggggtggggcaaatgcaccgaggtccccactttttcctgctgccctcggcaccctggggatgcaggcatctgggcacatctgccccttattgctgcccaccagcgttaaacgcccccgatcccaacactagcaccacaggtggttccggggcagggagaggcaggaatgggaaaattgcttagagaaagattccactagaatccagtgaattgtgctcagttctctttacttcctacaaccgagtacatgggtcacagggtggagggtgcaacaggacatggaacatgcccctccgtgccccccaacacacacctgcacacaggatggtggtgtctgcagcatcacaggtcatgcagggcatggggaaggggaggttcacacacacatagatgcccacagcgggtaccagacggagaacacccctgaatatacatagctgtacatggggaacccccaggtccccaccccaaccctctcccctgtcttgctgtcccccgcaggggaactatattgctttgagagagccaccccaggggctgctctgccaggcaccctcccctcccacccacccccattttggcacatctgcaagacacacagcagcgagagtaggcaccctcccttcccaggcttctgtggcctggagctggagaagggggtaggagacttcatcctccatcctcccctaacccttcccaaacccctgccaaacccactcaagccagaacccacccccaccccccaaacacacatacaaagctgagctatccaggaacacaagggaaacaaggagattgtccagggtgggagcggaggcagcgggggaagaagactggaagcagagacctccccccttgtggggggcagactggcacaacagctactttagtgcaattggagagggtgcccagagtgagaggtggagaagggagggaaggcggtccccaacttccctgggggcaaagtcaggcttccagattccccagggaaagggcctagcaggagtgggtgagggccaaggtggatcctctggttacccgccaccctctgccctcccaaatgcagtgacagtgtccccctcacacctaagtgggcaacagcagccttggagtcagtaccttcaagtaattcaaagagcagaccctccccaccccagcttcaccccatctctgggatttggtcgcttctctaggggttgggttgggaggagggagcccccaaggcagacccttccctctctacctcccgattcccagaccactgggcttggtcctcaaagattcctcacctccgcccttgcccaacctgggtcaaggctgcagaaggctggagccaccacaattagaggggaaggggctgctttgttccttatccctccttcttaaaaggtagggttcaaactaggcgggatgggggcccatactggtttgccccaggagtagggtttctgggctagggtctgtaaggctattttcctttgcggtgggaaggggaggtaggggatgaacactgggtatgggaagtgggtgagaaatggctgagagggaaggaggaaggggcctccccgctggagcagtcactggagtcatttagacaaaaacactcatgtgcataagatacacagtgcgcaaactcagccctgccagcccggccccaatcccacctctcaggactccttccaagaccctggaggaggttctggggatacagctgtagaaccgttcactctggccccatccaccccacctccagcctcttctccccttctaggtccagggagtaagaaggtgctcgggtgggcagacagtggtggaaacagtattgagttttcctttggttacatattgaaggcaaaggtgagctggacttacagtcaaaacggataggggtgaggaaggaagaggggccatggctggggttggagagggaggtaggccctcctcagcccctccaccccaagaaacacatctacgtggggtggcagtccctcagtcttttctctcccacgccccacagcaccaaacaaaaggagaagccccctcccccaggggctgctccccaccccaacctgggctgtacattcagtggttttcagcagtcctatggctcagggggccacggggcaagggaggtggcccgtcagtctcagtggacagtggcagggacccgagtctgctggtcctttcttggaaccaacggttgggccattccgtttttctgaaggaatgattagaacccctaccagagccaccgcccaatcagaataagtccccccaaaatcagaaaccaagactgggcttttttcattttaccacnnnnnnnnnnnnnnnnnnnnnnnnnnnnnnnnnnnnnnnnnnnnnnnnnnnnnnnnnnnnnnnnnnnnnnnnnnnnnnnnnnnnnnnnnnnnnnnnnnnngttttgctcttgccacccaggctgaagtgcaatggtgtgatcttggctcactgcaatctctgccttctgggttcaagcgattctcctgcctcagcctcccaagtagctgggattacaggcacatacaccatgcccgctaattttttaatttttagtagagacatggtttcaccctgttggccaggctggtctcaaactcctgacctcaggtgatccacctgcctcggcttcccaaagtgctgggattacaggtgtcagccactgtgcctggccacaaagtttaattctttagtaagctgactcctcagacatctctcaccaaatgaagtcttacaagtctgagaataaattttctctcccagatcccatgaagctctaacaagttctagtctgaatcattctgattactggccacagcctcttttttttttccttctttcttcatcctctttagatgtatggtggcatgagaggcatgaagggattggtctatgagacatcagttcttgatcctgatgaggtaagacatcttcatgtcaattactaataatcattgagtttgtgcaaatacgcataccgtggattagaccagtaagggtaagcacaaaacagagcacctagcttcatatattggaaggtagagaagacatatgtatggaataattgaagaacaaatttaccttttaaatatatcaactagtaaaaataaaagtacaaaaccagaggtaagttatgtgaagatttaagcttaatttaaagttctgttctggactgggcgcagtggctcacacctgtaatcccagcactttgggaggctgaggcgggcagatcatgcggtcaggaggttgagaccgtcctggctaacacggcgaaaccctgtctgtactaaaaacacacaaaattagccgggcatggtggcaggcacctgtagtcccagctactcgggaggctgaggcaggagaatggcgtgaacccaggaggcggagtttgcagtgagccgagatcgcaccactgcactccagcctgggcgacagtgtgagactccgtctcaaaaaaaaagaaaattaaaaattgtattctgggctaggcatgatggcttgcccctgtaatcctagcacttttggaggccaaggtggagcattgcgtgaggccagaagatcgggaccagtctgagcaacatagcaagaccccacctctacagaaataataattaacataaaaagttctactctaacttgttgtaaggtctgatgagtaagaccagtcgtgtgacttctaggctataaacttgagttgtaattctctctctcctctctcaagggcatccgtttccgaggctttagtatccctgaatgccagaaactgctacccaaggctaagggtggggaagaacccctgcctgagggcttattttggctgctggtaactggacatatcccaacagaggaacaggtaaagcagaaggatattattagctcttctcattccccttcttcattgcctttctctaatctcagacacttaatgctgatccggcatttatagagatgcgtagtgaagggaaggaatcagcagagttctgctgtataaatggattgggttgacctctcttgggttttctttactcagatgttgctgtccttttttatttttctccttccttgtccttgctggtgttctgagcactgtctctttttccacaggtatcttggctctcaaaagagtgggcaaagagggcagctctgccttcccatgtggtcaccatgctggacaactttcccaccaatctacaccccatgtctcagctcagtgcagctgttacagccctcaacagtgaaagtaactttgcccgagcatatgcacagggtatcagccgaaccaagtactgggaggtaggaaatttgggtggggtgatcggtgtgtgatggggattcaaaggacttgagtgtgaagggagggaaaaaatacagaatctttagaaaaattacctctgagttaatcagaaactaacttaacagattttcattggaggcttgttttttgtcagttgttggaattacaaagctaagtagagcatggtttctatcaccaggactgtttgtttggttaggctgacacacgtgcagaaaaaagaaattattaaaattccatagtcggccgggcacagtggctcatgcctataatcccagcacttggggaggccaaggcgggcagatcacgaggtcaggagttcaagactagtctggccaatatggtgaaaccccatctctactaaaaatacaaaaattagccaggcgtgatgccgggcgcctgtaatcccacctactcaggaggctgaggcagaagaatcacttgaacctgggaggtggaggtttcagtgagccgagatcgcaccactgcactccagcctgggcaacagagtgagactccatctaaaaaaaaattccatagtcttgctgtaacagaggtatgtacacatggctgttgaaacggaaaagagacctaggtaggtggctcacacctataatcccagtgagtcatgatgctgaggtgggaggattgcttaaggccaggagtttgagatcagcctgggcaacatagtgagatcctatctgtacataaaaaaggagaaaacaagaaaagaaaaggatgtgacttaactgcagggtccctgaggaaggtttcacagagcagtctcatgctagcaccagagggtcactttccctcactatcttcttcaaatacagaaaactttgagaaatcttacaagttgggagaacagcaattgcaactctggagtctaggaggactaatgccagtcagtcatgttctcggctagccaacctaagatacccatcaggagtgggagagtggttagtatccttggagtaggctccagatccagaaacaaatgagctttattctctgaaaatgaaaagtgtccttaatagtttacaacgctggttggggtatggaaagattgtttcttatcccaatgcatagtacataattccttccatcctcttctagtaccccacaaactcagaaacactgggtaaaagtacaaatgatctggctaggtttacaggagaatgtaccattttcttttgttccttatttggagataggtagtataggaacagaaaattttctttttacaaagcaggtacattaaatgatttttggccaggaggtgccagccaccaggaaggccctaaagagttcactgtggtgcaagacacagaagagcatgacccactgctctgatgcaaccaccttgggtccttggcaaatctagattgatttagttggtcaatattaatttggcaccaactgtgtgtagagaattgtgtttgcagttgaggaagacagagagcatttaaaattgatattaacttggttggcattggggagttggtatcagaatgatgcaaaatatacacattcacaccacataaagcatttatttataaaggcttatttataaacactttaggtggtatgaatgtgtatatttgtacctgcacacattagcaggtacaaaaggtcatataatcttaatattttgtttttcattttatttatttatttatttttttgagatggagtctcgctgtgtcacccaggctggagtgaaatggcatgtgaaccaccgtgcccagccatttttatttttatttttttagaaataggtctctctctaatcacccaggccaggatgcagtggcatgatcatagctcactgtaaccttgaactcctggactcaagtgatcctcctgcctcagcctcccaagtaacaaggactacaggcacatgccaccatgtctagctggcattacaggcgcacaccaccactcctggctaatttttttgttttttttttttgttttttttgggagacggtgtcttgcactgtcacccaggttggagtgcaatggcacgatctcagctcactgcaacctccacctcctgggttcacacaattctcctgcctcagcctcccgagtagttaggattacaggcgcacaccaccacacccagctaactttttgtatttttagtagagacagggtttcactatgttggccaggctggtctcgaacctcctgacctcgtgatccacccgcctcggcctcccaaagtgctgggattataggcgtgagccaccatgcccggccgaaatatctttatagcaacacagtgagttgatgtctccaggagacagttgacagtgactcaaaaatccccttactgagttgcagctgatagttcacaattgccagatgtggtggctcatgcttgtaatcccaacactttgggagaccaaggaaggaggatcacttgagcccagaagttcaagaccagcctgggcaacatggcaagaccctgtctctaaaaaaaaaaaaaaggaaaaattagccaggtgtggtggtgagtacctgtagtcccagctacttgggagagtgaggtgggaggatcgcttgaggccaggaagttgggcagcagtgagcaacgatcatgccactgcgttccagcctgggttacagagcaagaccttctctcaaaaaaaaaaaaaaaatcataatcatcatgtaagacatacagcttagggccaggcgcagtggccaacctggccaacatagtgaaaccttgtctctactaaaaatacaaaaattagctgagtgtggtggcatgcgcccgtaatcccagctacttgggaggcggaggcagaagaatcgcttgaaccagggaggcagaggttgcagtgagctgagattgtgccactgcgctccagcctgggctacacagtgagactccatctcaaaaaaaaaaaaagaaaaagaaatacagcctagtaatgctgaccttggtctgaatttatagccatgccaattacaagctatgacactgggtaggatacttcatctaagtcttggttttctcttctttttattttttaataccttgaaacttagagttgttgcaaagattaagataatgcacattccaggccaggcacagtggctcatgcctgtaatcctagcactttggagaccagcctgggcaacatggtgaaaccccatctctactaaaatagaaaaaaaaaaaaaaattagccaggcgtggcggcgtgtgccacctaggaggtggaggttgcagtgagccgagatcataccactgcactccaggctgggcaacagaacaagactctatctccaaaaaaaaaaaaaaaaaaaaaaagataatgcatgttccacatttagatagtatctgcaaatagtaagggatcctccagtttaagttttagctattatctattaaatagaggcgtttggtttaccttgtagtttaagggtttaaatttagattttattagcccacttgtcctttgccactagggggtgctattgcctccctacactttaaagaggtcctcccaaggtcacaacaacctaaattctcagccttctctcccttgccccttcaagttcccaagcacttagttatacctggacctagagctcacttggctgctttattcatgccaatctttcttccttaacattctctccaacctccccaggtcccatcagtgttgagaaggaatctaggccagctcctgggagatgccagttagccgctttgatcctgtgctttccaattgcccttatagcagtcgatgtcaggattggacaacttcaaaacaagtccataaagtccccatggcactaggggctctgggacccagtgtcgagaggcttagagcattgctgttccccacccaatcactaaagctccaagacagatgatcctgtggcctctcaataattgtccctttggtagtctcatcctggggcactgaagttcagtcctgtggtctgctggttagtctctgtggataattaaccagagaaaaggaaccaggtcagactattctagggttatgtggaaatcctttatgagatgctaaatggggagcaaatattgatcagtgaagctttgaagtcaccggggtcttcaaaggtagctgaggtcagtgctcctctggagcattgcctaaagttttttcctgagacctaactatctgatccccaggccagaagagcattggttgttaggtgtgaagctgagtataaagaaaattaagaagagaaaataggggttttctatctctttttccaagtccaagctagaaactcggttctttgtaaaggagatctatctaaacctggcttaggtggatactgagacctgtgatccttgttactgctatgtggtgagataaaagggctattcacagctgggcacggtggctcacgcctgtaatcccagtactttgggagcccgaggcgggtggatcacctgaggtcaggatttcgagaccagtctgaccaacatggcaaaaccccatctctactaagaatacaaaaattagctgggcgtggtggcgggcgcctataatcccagctactcaggaggctgagatcgcaccactgcaatccagcctcagctacagagcaagatctgtctccaaaaaaaaaaaaggcttttcacttggggctggaggtttgtagataagatgctcttgtccttggggtcaatgactacgacaggcttagggaggcacaaaagtcctgaagcctcgtctacccagaggatttagaaagtggtgcggaatatcacttcagggtcgtgtcatggtctctggggagcacaagataagagagcatagaagactgccaagtaggagaagtggcccagaggccctagagaatgtgaccaaaggggatcttcgatgaggggctagtctgcggctcctaatctgtggctaaagtggggtgagctgctgtgtggggttacgtgaccagagtggcagtgagactaatgcccatgacccagaagctgtggctggctcggaaagccttcatagtaagggcgcagttaagacttggatttcctgccattacacacagaactgacagctcacaaagcactggatattcaggctcctgcttttgcttttctccccatatcggggtctgttagtatctataatatcgtggcctctgctgacctcaaatgatctccaccgagcagctaactctggcatcctagcctgttgtccacatgatgtcacctccatggccgtgaagccattaaccaaagacattcctcaagaaagcgcgccaaggcggtagaaggatcaggcaatgatcagtttccatgatcatattacggaattggctccaaggaccttcagaggtcgagtcctggagcgtctcctttagcattcgcctcagagataaccccaaaagtgttaaggtcaaagggaaaagccaagagggaagttaactgagttatcaggcacctatttagccacccgcacttccccgcccgccacccatccacccttaattagccctaatccgggcggtccaatcctccccgtcacaactgctgtcaagggctaaggtcccgccccgcttccataccggaccaatggccgggcccggggagagtcccttgagaggggcgggctcgggttccggccagtgggcggggcctccttgaggaccccgggctgggcgccgccgccggttcgtctactctttccttcagccgcctcctttcaaccttgtcaacccgtcggcgcggcctctggtgcagcggcggcggctcctgttcctgccgcagctctctccctttcttacctccccaccagatcccggagatcgcccgccatggctttacttactgcggccgcccggctcttgggaaccaaggtgagcagcgaggggagggagcacgccgtcccagggtggggctgaggcgaccgcaggccctccggcgccggggtctccctcccacacccgtgcgcaccctgcgcgccttaaagggccctgcgcttggctggccgccagccctgcgtgaagctacaggaccatgtgccgcgcttcccttctggctcctgggggtgaagtgcacgccgcccgccctcggcccgcagtccagaacgcgtgaggaggccgaccctgctgtcaccccgcatgtctgaaatgaaaggggaagggatgcgtggccctgaaatagcaaggagccgagacaggaacctctggtagagactagagatgtggtgttccactggagttacagtcagtttggtggagggagcgggagtgaagatatgtgctcactctggagcagtggctaatttcgtcctctgctttgtaggaagggccttgtcagttcccgaactgcctgtttccatttctccaagcctattatttaagccttcggtgaccacgccgagcacaagagtgggtccttcaggccctcctctttgtccttgggactcttgcactttttatataggaggagcttgggtggggtggagcacttctgtacaacctcctgcatgactatcatacatgattgcagaaagaaccagaaaggtgtttccaccaaactgcaagccaataaatgaagatcctcggcaagagatactaatgccaaggtcacatgaccgtcatactacttgcttacccaggttatgccgttgatcttaagtctactttatccaggaactttctctccttctttggggtcctttacttggtattgattgccttttgggacatagaaatactgttgcaggtaatgatgccttcaatttcaaattgcagtacttttagttctaagtaacttggcccttttagacagaaactgctgtgctgagggagtcccagccctctaatccaagcaggggacagtcccacaagtgaccttgacttctgcaaagaacttagtttttcctgcggataatttaaagctgacagcatctgaaggaaaggaaagccttaggatggttttggcttgctgtatgtaatttttttttttttttgagacaggatattgctctgtcactcaagctggagtcttgtggtgtgaccaaggctccctgcagcctccacctcctgggctcaagcaatcctcccacttcagcttcccgagtagctgggaccacaggtgtgcaccgccacgcctggctaatcttttttgatttttagtagaggcagcgtctccttatgttgcccaggctggtcttgaactcctgagctcaagtaatcttcctgcctcggcctcccaaagtgctgggattacaggtgtgaaccactgcacctggcctgctgtgcgttatttttcatggttggcacaaagtgaaatttgtttgatttaccttggttcttccaggcacccagtggcaagtactagctgagcatttgggagatgcttgtcttacttggctgttgcttctcctgctgctggggaaaagggtaaggaaacctcttgggaaatgaagcaagttctagatagcgttttggcagaatgggggacactataattagctcatttctgagctgctaacccagaccagatagtctaaccctgcagtgaatgtgaaaaagccttgggatttacctattgaatttattttcctccttaagcccatagggaagctcagaacacttttgggatgacagagctacataattatggtaccattattttcctgttagagatggcctgacgatcctagtcacctatcagttgaaagccattagaaggcttttgacccttaaaagtaggtcaggtgcagtggctcacacctgtaatctcagcactttgggaggcagaggcgggtggatcacctgaggtcgggaatttgagaccagcctgaccaacatggagaaacctcatctctacgaaaaatacaaaattagccagacatggtggcacatgcctgtaatcatagctacttgggaggctgaggcaggaggatcgctcaaacccaggaggcggatgttgtggtgagcccagatcgctccattgcactccagcctgggcaacaagagcgaaactccgtttcaaagagaaaaaaaagggcggggggggtagcaaagcccaataatgagtttattggactggaaatctcctgagaaataagcaatatgaccagggtaccaagaagcttgttggcttgtcagcattgctagcacctgcctgtgctttctagattagcctgtggataatgctagtcataattggtaattttacttttgctagtaaggtagactttgggaggcagtaatttcctaccagggagaactgactcttaccactttgagtctcagcgtcaggtgtagttttacttttctgagaagaaatttttttttgttttgagacagagtcttactctgtcactcaggctggagtgcagtggcgtaatctccgctcactgtaacctctgcctcccaggctcaagcgattctcgtgactcagcctcctgagtagctggggttagcaggtgtgcaccaccacgcccagctaattttttgtatttttggtagagacggggtttcaccatattggccagactggcgaatttttttaaccttactaggagacaacatgtgaattagtcattgttctattgttctactctcactgtcacataatttaaatgtcacataatttaaaacacctgagttagaagctaattcagagagctttgagattatttgacttcttgtttatccaaattcattaatgctaagcaatggccttagtattatctgtgggtgactcagttttgtgacatcaaaaatgtcttttcacagatgatctgggtttggatttgggctaggaattgaagtagggctgcagttcacttctggacttttgaagtcaacatgcttaaccaaccctagctaaagggaactgtctcttgagccactgaaaattgcttctccaagctagtatgtttgaaactgagtaaatcaattcaaagatgtttctagattacttctagactttttcaagacacttaaatgcaaaggaaccaatggtttctttacattggacttataccactgtacaacatcacctgtataagtcctactcagaaattgggttcaacaaaaccgagttggttttgtcctgcaaaatatttagttaggttttaaagcccaaattttttaaaggtaagggctcatatctctgtgccctcactttgactatcagcctacccaaagtaacggtgattccttgatactagaatggcaggggaagccttatggggtgttagtggtgagatgactgcatttggtcttcccagtggcctttaggttggtagcaggtgaatgaatgcatggggaggcagcaagaatagtatggtaggtagcagcgatagagttggcattcctgacttaaaatccaaggggcagcagaagggaaaccagacttggtggatttcaataaagccacacaatgattctttctgccctgtgtcaatactttatgcaacagagtaggatgtgaaatttaaaaccgtaatgaggcaactgtagcaatagatctttcttagcatctgattatctttcagttctggcttcaactgtgcttcaactgcacaagttccttagttctctgttttgggttttttttggggggtggggctggagtgcagtggtgcgaacatggcttgctattactacagcctcaacctcatgggcccaagcaatccccccgagtagctgggaccacaggcacgcacagccacgcctggctaatttttttgtagtttttttggagacagtgttttgccatgttgtccaggctggtttcgaactcctgggctcaagcaatccaccagtctcagcttcccaaagtgctgagattacaggcgtgagccactgcacccagccctctgtatttcttttaacatgatgctattttaaaaggtctgtaaactcacagtgggcattgtcacctgtaatgcttgcttatgttgcagtttcctggatcctaccttcagattacaattctgcaaagtaggatgggatctggaaaagtttcttgtaaatccctaaagtgtcagggagttaaaacttgtaagaacttctttnttttttttttttttttttttttttttgagacagtttcgctctgtcgcctaggctagagtgcggtggctcgatcccggctcactgcaagatccgcctctggggttcacgccattctcctgcctcagcctcctgagtagctgggactgtaggcgcccaccacctcgccccgctattttttgttttttagtagagaccaagttgcggattattnaccgcaggccnnnnnnnnnnnnnnnnnnnnnnnnnnnnnnnnnnnnnnnnnnnnnnnnnnnnnnnnnnnnnnnnnnnnnnnnnnnnnnnnnnnnnnnnnnnnnnnnnnnngggactgtcgttactaccctcctactaaggggtgagaacactgccaagggagcacagaggaagaggcatctttcccagggaaggctgggaaaggcctcacagaggagagaagctgggactgagtttgagatgaacaggacttattcgggtgggctgggaggagaaagcatcctagggcaggggttggcgtgcctggaggtggggaaagcatgttggtcagcagaaggctgataactgaacatcatgctctaggttctctaggagagcattcagaggataaaggagggcattgaagccagaggggttcagggcagaccttgagaaggtaaagtgggtctggagctgccattgaagaatgggtaggatttagagaacctacctagagctgaggacgggtggcggccaggtaggcctggagggccttggtcctctcctctggccctcccagaactgtgccctcctgggctgggcctgtccctgcctcacagtctacccccggctccccagctgtctggagttcttactggataacggtgcagacccctccctgcgggacaggcagggctacacagctgtgcactatgcagccgcctatggcaacagacagaacctcgaactggtatgtgttggggcccggcctgcaggaggggaggcaggggcagggcacagggtttgtggattccaaaactaagggttcaatcaaatgtggtctttggatccagaggcttagtggggattactgcgagtcggggactggggtactatcttgggagttccagagtctcagcacctactttcctgtcctttgcagctcttagaaatgtcctttaactgcctggaggatgtggagagcaccattccagtcagccctttgcacttagctgtgagtcccacgtcttttttctgttgccttccttgtcctacctgttcccaggccctaacaaaggtgccagcacttgtgaagttatccttccttctgcctttttgtgggagaggggataagcacagtgcagggtaggaagccttaaggggcccaaggagcttgtcaaggactaagaccttgagcttcccagggaccccaagagcagagaaggggaagggaggagcagggaaggtcccgagctgtgtgcactggttgcctgcaccttgccaggcctacaacggtcactgtgaagccttgaagacgctggcggagacgctggtgaatctggacgtaagggaccacaagggccggaccgcactcttcctggccacggagcgcggctctactgagtgtgtggaggtgcttacagcccacggcgcctctgccctcatcaaggagcgcaagcgcaagtggacacccctgcacgctgctggttagtgcccactttaggctgctgccctacccttgccatgccagatccctcctggatgggaatggggctggaaagtggagtagggtgaggagaatggagacttcaagccctgattcatagcttcctatcctcagagatttctccctggcccaggtctttctgtaacattgaccccaagtcctttaggcttgaccttgcctcccttcttcctcctggccctgccctgacacggggtccctttcccctagctgcctctggccacactgactccctgcacttgctgatcgacagtggggaacgagctgacatcacagatgtcatggatgcctatggacagtgagtgtgggccagggtggggtgcaggttttccagtccttgcgggatcctcactcctcctcctgcccttctgtaggaccccactgatgctggccatcatgaatggccatgtggactgtgtacatctgctgctagagaaaggatccacagctgatgctgctgacctccggggccgcactgccctccaccgcggggtgagtgagcttctaggggggattgtttgcacatgggcctcagtgtgggagcatgggactcaccagcagtagggaatccaattgtctaggaggcaagccaggattttgtgccgtcttttttctttttcttttttttttttttttttgagacagggtctcactcccattgcccaggttggagtgcagtgacactatcacagctcactgcagccttgacttcctgggctcaggtgattctcgcacctcagcctcctaagtagctgaaactgtaggcacatgccatcatgcccagctaatttttgtattttttgtagatatgggggtcttaccatcttgcccaagctggtcttgaactcctgggttcaagtgatccccccaccttggcctcccgaagtgctgggattacaggcatgagccaccagacccacgctgtgcccaggattttattgagctttgtgcttgctccaggatgagttcctgacgtccccagctgatttccctgatatctgtgctttgtttattaatattattattattattattattattattattattattattattattattgagatagagtctcgctctgtcacccaggctggagtgcagtggcgtgatctcggctcactgcaacctccgcctcctgggttcaagcaattctcctgcctcagcctcccgagtagctgggattacaggcgcctgccaccacgcctggctaatttttgtatttttagtagagacaggtttcaccgtgttagccagggtagtctcaatctcctgatgatgagatccacccgccttggcctcccaaagggttgggattacagggcgtgagccactgtgcctggccaatatctgtgctttgtaatcacgtacaactgagtgctcaccacccagactctacctgggataccctgctggccccaacccatcgcataatgtcgccacaacctagatcctcttccgtgaccacctgtcctaagctgcctcctcctcccataagattttttgatcccttagtctccttctctccatttagtctttccagtattaactccagagctccagtattaactcttagtatcctgattgtctgctggcatagagagagtcaaggagggagatgtggtccctaatacttagaattgttgttgtaaagggccgggcatggtggctcacgtctgtaatcccagcactttggaaggccaaggcgggcagatcacctgaagtcaggagtttgagaccagcctggccaacatggtgaaacttcgcctctactaaaaatacaaaaattaattgggcatggtggtgcatgcctataatcccagctacttgggaggctgagacaggagaattgctggaacctgggaggcagaggttgcagtgagccaagatcgcaccattgcactccagcctgggtgacagagtgagactccgtctcaaaaaaagaaagaattattgttgtaaagacaaggattgaggccagtggctcatgcctgtaatcccagcactttgggaggccgaggcaggcggatcacgaggtgaggagatcaagaccatcctggctaacgtggtgaaaccctgtctctactaaaaatacaaaaaaattggccgggcatggtggcacctgcctgtaatcccagctacttgggaggctgaggcaggagaatcgcttgaaccggggaggcagaggttgcagtgagccgagattatgccactgcactccagcctgggcgacagagcaagactccgactccaaaaaaaaaaaaaaaaaaaaaaagacaaggattggagccctggaagtggttcttactcctgagccagactccagcaacaggccagtggaaaaggaggagcttttcatccccctcacacccccatgttactcacaggcagtgactggctgtgaggactgcctggctgccctgctggaccacgacgcatttgtgctgtgccgagactttaagggccgcacgcccattcacctggcctcagcctgtggccacactgcagtactgcggaccctgctgcaggctgccctttccacagatcccctggatgccggggtggattacagcggatactcgcccatgcactgggcctcctacactggtactagactggggcctccacaggcacaggagcatgtgttggagtgtgtgtagagggggacaggtgggttgttgggggggacctgggttgatctgaatctggaagtggaatggagtgtcaagacacaggacagacagggaaccttgccgtttttctccatcactactcttccttcctcgtgcccaggacatgaagattgtctggagttgttacttgaacacagcccgttttcgtacctggaaggaaaccccttcactcctttgcactgtgcagtgtaagtcccttctgctgcatcagcccttctcgcgagggcccatgacttgagcttaggacaggtagtctacttcccttgtccttcctgatgacccctcctccctcttcctctaggattaatacccaagacagcaccacagagatgctactggagctctgggtgccaagattgtgaacagccgagatgccaaaggacggtgagtgatggaagacttgggaagaatcccagttgcctctggcttcccctttctgcttgggcagtatactcttccctattttaatctaccctgatccctgccttacaggaccccccttcacgccgctgccttcgcggacaatgtctctgggctccggatgctgctgcagcatcaagctgaggtgaacgccactgaccacactggccgcactgcgctcatgacggcggctgagaacgggcagaccgctgctgtgggtgtgtaggggccacttgtggaagggaggagctcccctggggcatttgcaggatgggtcagccctgcctgtggaggctggctggggctggggttcagaaagcaagagggttgtctttggatgtctcgccatctgcagacgggatgcaaagtggagagccaggatggctactgctctggagggaggggtcagtccctctatcacatttctctcgtagaatttctgctgtatcgagggaaggcagaccttactgtgttggatgagaacaagaacacggccctccacttggcttgtagcaaggtacttacctgaagtgattgggggactgcataaggggcagagcttgatgaagagaggtaagtctcggttgcagaggggactggggcagaagtgaggattgtccagcctatccgactggttgggcagctgtttgtcctcctgttactctccccaactcctgccctgcaccctgccacatttctacttcacaagtctccactctctgttcccctccctcagggccatgagaaatgtgccctcatgatcctggcagaaacccaagaccttggccttatcaatgctaccaacagtgcgctgcagatgtgagtgcctggggaagggggctcctggctgggggaggccagtgggtgatgaaagagtggccgctgttcagaggctctctggagcccattgtatttgttcagcacccttgccaccctgtctggaggtggaagggcagcttagcatcaagctccttctttttccttttttccaaggccactccacattgctgcccggaatggtctagcttctgtggtacaggccctgctgagtcatggggccacagtgctggctgtggatgaagaaggtgggtggggtctggggccccatgcctctcttgggtttggggtcagggacattcttcaggaggtgacttcttaatcttgctatacatgggattttcttcccaagggaactcttcagagcagggagcccacaccagtactctggagtctcagaggggagcctgcagggtcaggaggactccacaccctaggctttgactcccatgcccgccctttaacccgtacttagagaatctgcctgtcagccttcctgggccctcgtcacccttggattctgccgctgctgggtactgcctgccttggctccctccacagagaagagacttcagggcttgggggaggctggctaggatacaggactctatgcctcagttctcccccttggccctgcaggtcacaccccagcactggcctgtgcccccaacaaagatgtggcagactgcctggccttgatcctttccaccatgaagcctttcccacccaaggacgccgtcagtcctttcagcttcagcctgctcaagaactgcagcattgcagccgccaagacggtgggtggctgcggcgccctgccccatggggcctcctgcccctacagccaggagcggcccggcgccattgggttagatggctgctactctgagtagccccctccagtgtccctcccccgccggtggcttgatatctaattctatttatttagaaaaagtctaaacatttagggcactttaaaggagaacacgactgggtggagggggcggaggggaaggaagccctggggagcagctgctcacccctttgccacaccatcttggcctggcaggggtctgggactgacagggagcac

SEQ ID NO: 2396 - protein, 1232 aa, Homo sapiens [sequence omitted]

SEQ ID NO: 2397 - DNA, 16291 bp, Homo sapiens
  source (1)..(16291)
  CDS (201)..(1451)
  CDS (1731)..(2024)
  CDS (2063)..(2757)
  CDS (7403)..(7749)
  CDS (9923)..(10073)
  CDS (10186)..(10354)
  CDS (12287)..(12442)
  CDS (15669)..(16091)
ccagggcaagggagaggacgacaccaaggaggtcactgcgtcgtaggagagggccagcgtctgccgttacgaagagttgcaagagctgtgcctacttctgcccagataccaagaccgccagctcctggatggacatatccttgttgacatagcggtcatactgagcaggggtcagcctgccactctgcagggcctcttcgatggagaacttcttgccagacttcctgtcgtgtatcactgaggactccccattgggacccttcactgagatctcctcccagtcgcactcctggcttctgagtttcacgaacatgttccagtcaatgagcccggcacggtgggcttcctccggggacagctcgcggcctgtgtcagggtggatgactacgatggagcgccgcaggtggttctcccgctgctcccgcttgacggccacggagcccaggcgcttctgcagctcgtcgatctcgaggtctttgtccttggagagcctcttgaggtcatccagttccctctccagggaccacagtctggagtcatggttggtcccagagtccgccacggtcatgttccgcaggtctcgtgtttccgtcgctgccatgttgatttccgattggagccttcgggtctccagctgcaggttttgcctctccagctgtaatttgtggttctcttccctcagaaagtctagttccttggatgacttggagttatggaattccagctccgaaagcctggcttccagccggctcacctcgacgtccagctcgcgcttgctgcggctctcctcctccaggctgctcttgagcctctggatctcttgctcggtgtcgcccttctccacctggacactctcggagagcaccaccttctccttgacctccgccttctccagtgcagccagtttcctccggagggtctcgagctccccctccaggagctgccgccggtgctgctcttcttccagctggagtcggagcagggcatgctctcgcgcctgctgcgggtcctgctgcagcaccaccttctgcgtatgggttaccttctcacgggcctcagcttcttcctgctccagcgctgccagccgctgctgcaaccgctgtacctcgcgctcggcctccctgcgggcctgccgctcgcgctctagctcctccagctgccgctcaagctcggtgcgccggcgctgcagccgccgcagctctgcccgcagcttgtcaatctgccgcagctccacatcgatgctctcggcaaaggcgctcgcctcggcccgcaggcctggctcctcctcatacctgaccacctcctgctgcaccaccctttccttcacccgcgagagctcctcctctttccgggcgatctgctcttcctgggaagctctttccctctccagatccacttgtttcttctgctcctctgagagctttgccctcagagacgccacctcctccttggtttgagggtcttcttggaattggaggatctcctggaccacctctttggtctggacctggggtttggtgtctttcagggcctggatttcctttttcagctggtagatctctaaatcacacctttcgatcagtctggtcttgtccacgatctcctccctgagccgctgaagctccttctccatctcagggtcagtcttgtacttaatgacttccttagtcacctctttgacttccacctgggggcctcgcctcctgagggcctccagctcactctggtagctccggagctgctcctcggcaccccggtactttcgctcctgctccacaagctccaggcggaggttcgccacttcactttccgccttggggtctggccgcacgatctcccgcaccttctcctgcaccaccactttggcgttctcctcctccaaggcccatatctttcggagcagctccgtcttctccctctggctagcgcgagccttggcagcctcgtcctcatattggcgggtgagatcgctgacctccctctcggtggccgcgtccttctccaccttgagcacctccttgacggtgatcttgccctcggccatggcccgctccttctctagcctcttgagcttgtcctggaggaagctcagctcctcctcctgcttctccctgagctggtcctggcgctggtggtcctcctgcagctgctggtactctgcctccagctgggggtcattctgcagtttcaccacctctttctctgtgaccttctcctgcgcccggctcttctcttcagccagggcggccacacgctgctgcaggaggagcacctctgcctcccgggcgcccttctgccgcctcagtgcctccagctcctcccgcagctgcaagacctcatccgcctgggccctgtcaggctcgatgcgcaggacctccttgaccacgtactcctgccccccgtctctggtctcctgctccagggcacgcagctgcagctgcagtgcctccagctcctcctgcagcagctggttcttgtgctgctcctctgccagcgtccgctgcagctgctggaagctctcctccagcacgggatccggcaccttcttgagcacctccttcctcaccaccgattcctgaggcccctgattcctcaaggtccagatttcttcctgggtgctcttgacctcgttctccagctgccgcctccgctcagtctcctcatccagttccttcctgatcttccacgcctcctccactccagagtccggcctattcctttgcagggtctcatgggtcacttctacttccggctgctgtgatggagaagacaagacaaggttaaagccaggctctggcagcacatgtagggcctgtccccacctggtcagagtggctgtcctgtggtccccaagggactccctcagtgccagttcatgttagttgtagagttctagggttactttcaaaaaggatcaaacaactagtttggggttttttttaatcaggtaaaacatttttgagctgtggaagagtttaaaatgaaaccacggtctcccacctctggtccccgtcctagggcgtgtctgtcagccttgcagatgctatctgtgctcacacaagaatatctgtctgtagtatgtaccatgtgtttatctctcctgcacaaatggtattcctgctgctcactgcacttacagagctcattccagctcagcacagagagtgctgcttcaggatttaccagcagcattgtttccgctctctggacagaccgcagtttagcccattgctgatgaagagtgaactgcttccagtgtcttgctattaaaaaacaatgctgtcatcaacatcatggacttcagaaaataacattcactttcttttgtttctttctttttttctgagacagagtctcgctctgttgcccaggctggagtgcagtggcacagtctcagctccctgcaacctccacctcctgggttcaagcaattctcctgcctcagtctcctgagtagctgggattacaagcatgcgccacgacgcccagctaatttttgtatttttagtagagacggagttttaccatgttggccaggctggtctcgaactcctgacctcaggtgatccgcctgcctcggcctcccaaagtgctgggattacaagcgtgagccaccatgcccagctgaaaatagcattcactttcagcagatgtttactgagttgaataagttctcatgtcagtagaagcattggctcgggccagtctttgcattggccctgcccagaaacgttagcaaggggacacttccatcaattcacaaaccatttctctaagacagagtctgtatttgtcacctgttagaacagcctgaagtagaatttcttactaagatcagttacctgtctgaggagattcagagcaaactccagattctgcagcctctgtctgttgatggcataaacttcagtgaacttggcggcaagtgctgcttcctgcagagaagaggattaggagagcggtcaacaaacaggtgtcaacagggtaagcaacagagagctagacagcgtggacgtggttcttgagaagtgtggaatttgggggtagaggcatagctcttgcccactcctgcctggagttagactgtagcctcaccggtggagagaaaaatggatctcgaggcagaagatccaggccagggtcttggccacactgactttgagcaagtctttctgcctcttagagcaccagtgttctctcttgtgtgtacaggagactaatatcagccctccactgtacttactgaggtgagcaaaacaggaacttcccagatccatggttctgaccctgacacttctgttcagctgcattttcaaaaatttttatttcttaaagacagaatctctttcactcagactgaagtgccatggtgtgattgtagctcactgcagccttgaactcctgggcccaagtgatcctccctcctcaacctcccaagtagctgggactacaggtttgcaccaccacgcctggctaatatttttgtagatatggggtcctgctttgttgcccaggctggtctccaacccctgggctcaagcagttctcccacctcggcctcccaaagtgctaggattacaggtgtgagccactgcgcccggccttgctgtctttctaggcatattgatgtcactgccctagaacaagttcctcatctcttaccaaacctgtttgcatgcaggagggctctcagtggcttccctgttgtgtgtgcatctctgaggccagcgtgtgacaccatgctccctggggagcagggcagcttggcctccacctcagtcccgaggccgcctggcccatggaactcacctcttccttcactttggtggcaggagattggagcctggctctcttgctcacgtggcttctccttccattctccaagtcgagaagagaccttagtttttctgcttctaactcatagtcctgcatgagggagagacatggcagaggggagattaaaacagctgagaagagacagacatgttcctgtaccccttcaggctgacccagacctgccctgtgccatgtgctggttttataatctgcgtgggtcttcctcacagctgcaccctgcagtgatttccaggaggttttgagaattactgatatctcagcagtacatagctccatcactcagtaacatatgagacaagaagtgccccctgaattcccctcccagcctttctacatgcctagagattttcacattctgctgctgcttttaacatcgtaccataaccctgtctcaccttgccaccacctcttctcatgtttaccagcttgctgactttataatccatcaggtggatgtgtgctgattcacgcagctttccccttccactggacaccagtcctttccagcgtactagttttgctattgtaaatagtgctgttgcaacaatgttgtttatcctgcatttttttttttgtactttttccttaaggataaattcccccaaagtgtttactgcttcagagtataaaacccttttacagcattccatgtctagtaccatgctgttttcccaaaagcctgtgccagtttgcacagcagccggcagtgcctcggatggccagctccacccccatgtgccagggccggtgcttgctgcttctctgaccagggcacggtggaataagacccctgctgtttgtgctttgggcggaagtttcccggctcacctttacagcttgctggtactgctgggaattggcacagatcttctgtacttcctgctccctacttgctatctcatctagcaggttctgtaagacagagtttaaaaatcaaaactaaccagaaaaaaaatttaaaaaagcaaccatggatgcagtagctggaaatctcagaatctgaatttattcttctctagcacaaagtatgatgaatggctcccttgtatacatttttattcattgcaaaaggcagtttttttgttgttgttgtttttttttttttttttttttttttttttttttgagacagtctcactgcatcgcccaggctggagtacagtggcgcgatctcagctcactgcagccttagcctcctgggttcaagcaattctcctgcctcagcctcccaagtagctgggactacaggctcctgccaccatacccagctaatttttttttgtatttttagtagagatttggtttcattatgttggccaggctggtcttgaactcctgaacttgtgatcctcctgcctcagcctcccaaaatgccgggattacaggtgtgagccaccgcgcccagccacaaaaggcagttctaaggctctgtgaagaagggccaagatcattatctctgctaggaaacaaatgtttactgatgatttggaccaccagacactgttctgctgtctgacttagattatctcatttaatcttcaaacgatgccaggaggtaagcatcgtgacctccagcttatgagtgaggaaagcttctgaggtggggatgtggctgatggggtggaccccggatttgcatctcaagccattggcttcccgtgttcctccctcacccaaagggcactgcgttgggcatgggggaggcaggaaccccaactttgaaaatgggatttcccccacaaaggcggctcctcattctgtagctgttcactcacatagccaacccacgccaagtgtccattctgcaccaggccctgtgcggggcactgagctgggagaggtgagcgacacactcggttcttgttctcagagggttgggtgttgggagcttgagctgaggcccagggaggacacagctgtggcaggcctctgccctgctccacctcccaaaggcttggctccccagaaaggggcttgttgacctctgaccctcccttgccagtgtgtgcctggggctgcggaaacggccatctcaccttctggttcttcagcttggtctccatctggctgaggctgtctgtctcctggggctcgtaactggggatgctgactaggaactgcagcacgtggtcatggccgcggtggaagtgctcgtaggctgccttggcgctctgtaggctctgcgccctgtcaaggcaaagcgttcaggcctcagccacagcaaacagatgcctcaccgagccctcatttttttttttaaagtgggaaacaaccaaatgtaacaaccagaaataccccaagtatctcccacacagggtgggtggtcattagggaacgtcaggttggactgtggagaaccaggtgggtccatatacattgacttgcagagatgcccattgtggattacaggacccaggtaagcatgactcaaaagagagaccacagggccgtcagagaatctgacgaactcaccaaaaagaaaaacagcaaaatctgtgggacacggctaaagcattgcttagagggaattagatcgcattctcagaaaacaaaaatggccaccacccaccgcaccctcacctgcgttccacctgctggcgcaggttgttgaaacgctggcccagcttgtgcacctcggcctcctggcgctccaggtccggacagtgctcctggaagcggctgggccagtgtgctcgagcactgcttggccgcctgcaagttctgctccacctcacccaggagggacttctgggcctgtaactcacagaccatggcctggcgggggcagaggaggagacggcggtgctacgggccagagctcccagagccaggcgatgacacccactgaagccccctgggccactgactgtaggagggtgggcaaggccacaggtaggaaggaccggagccttgctctgtacatcccaaacctgggtcacttctgccatcttctgttttttaacaatgaacaaagccctgaaaagctaacttctaaaaaccctgcagcaggcagctcgtgccctgcgcgagaacagcctgccactgtctggtcatgaggctgtggcaaaagcaagtcgtgagatgggagtgtgaataaggggcctcaggtcacagacttgaatgtttcctgtgctcaggcagtgtgggaagggggcccgtggcaactgcgaggtaagcaggccgagaaggcagctgctcctctgcccactgacttgccctctgagctgcagcccaggatgccagctctgctcagcaagagatactgggaacatggattgttatgtgctttatgcttttttttttttttttttttttttaagagatagggtcttgcaacgttgtccaggcggctggacttaaactccaaggctcaagcaatcctgccccagcctcctgaatggctggtgttacaggcatgtgccactacactggctattgcagatatttgatcttaaaatgctggcacccgaaatcccgtaagtcacacagatcccgtgaatagcttggatttgtgctgtgggcctccatttgcagttcccaatttgggcattccaaacctggggagactggatgctggtgtcctcatctatccagacgggcgggtggatgtgccagatgctctcacctgctcacagaaggactcccaggacttgggccctagactcaccgccagctcctgccccttgctgtccaggacacggctgctctcaggcactgtgtcatcctgattcagatggttctcgtgtgtggccagcaactcccagctctgctgcaggctcttctccaggcggttggccacatcaaccctgagagcaccaatcaggcgtcgggggatgcccacctggccccctgaccccaccccaacctccatgctgcctgtctgccacccacttctcctgggccaagtccagcagctgcaggaggtgctcgtatttccggttggtgtcctccacccgggtcctcagcaggggtgtggtgccactgcctgggagggcctggatgaaggcttcgccctcagccgtgctccgcgtcttctcaggttcaatccgcagtagctcgttggtgatgttctgtgggaaccagggcccctcagttttggacacagccaggcagccccttcccctgaggatgtgcccagggtgagcacagattcccacatcaggcacagtggaagcagctggagaggcctggcacattctggggctctgacccggcatctggaccccagcctgagggctgtatttttcacgagcatcccagggaaccgctgaggtggaatggactagtgacaccagaagcacccaggcagctgccgggcctgtgctgtcctcagcactgcacgcggacgcttctgtttaatctttgcggcaaccccgggaggtgagtactacgactccacccagtcacgggtgggggtgtgacgactcccagcagcttaggaagggacttgtggggtcaggctacacccgagaccggcatcctctcgccctgacttggctctcactctgaggccccatcaggggctatgggacttctccaatcccagatcctcttctgtaaaattggagtgctactcactgcctcagagggctgccttgaggatgtgggagactttgtataggaaaggaggtggggggaggtggcccctccacgtcccccctggcatcagctcaccctgtcctcgccactgccctgtgagcagggccaacccatcctactgaagacactgaggcctggagtttataaatacaaacgctaacgtgtttgcagtcaagccagccggtgacccagtcctgcggaattccacagcccatgtgccatgccaggcgtcagatcgacaagccgtgcaggaacaatgcaagtcctgccagctctttctcctggggaggtaatgacagcagccctgccacctccatgacttgggacccttttacatgcagcaggctgtccctgacagacagctgcagtgaatatcccaagactccatggggaaaagacctcaaataggggccccagggggccagtgcagggctcccccggccccacctgtgctcctgacccgcaggtaccttgaggtccttggcccgctcggcactgtcctgcacagcccggccttgctccagtggtggccgcaggatccctgtgatggccttctcctgccggtccaggtcgctggccaccttgtccaagccagccagcagctgccgcccctgtaggtcagaggcatctgtggagggagggaggacacaggcaggtgtgacaacgggccaggggtgtgaggcccagggatggacctaggcagccagccccccgccgtctcatccacagcacagaccctggtccagcccctcctccccggtacccccagagcctcaggcgagtggccctggcacccacctccgggattctcggtcttcagcacctcataccgctgctgcagcgtgcgtttgctcccagctgccttctgccgcacgctccggtactggctgcccaggctgtgaggacagaaatgagctgggaacctgggcagcccaccaccccctgcacccacagaggcgggactgcggactctggctgggcagacaccccagaggagcctgacagctccttagatgcggacagcaagtgctcactgtggcactggcctttctgtgctcctgggctcagagctcttctccctccttccctcctctttcgtaggaagtctcactacctaaaattgtctgtccaataatcaccaccaagatgttacttctgagggagcatacacagtaggtgctcaataaatacttaataaatgaaggcattccttgaatgatccactcattcagcaaggagttcctgggcacctactttgtaccaggtacttaactaggccctggagagaggaaattcaaggagcccaggcccaatgagactgacgcatacgctagtcacttaataaaaagcggtgcgtgcagtggaagaaggtgcctgggagcaaagaggaggcagcccttatcccagctgagtcctccagccaaggggctggggtctgcaagtacagggagcagtgcgtgcgggagtcaggggcccttagaaactgcttagaaactcgtgagggggccaggacgaagcccagagctagacattcatgtttagcaagtcagctggcccacaatctgcccctctcctgcatgaacttccaagggggtgcagatggagagtgtcagcgaccccgcgctccccacaggctgagtccaaatccccggggctatgaatggggcctgagaagccctgggggtgggactggtccatgcagactcccgcctttgcccttgtacctgtcagccagagccagggcctcagggtctgtgggggggatcacaaaacacacggccggagcaatcagcttgttcccagcgctgtccatgagctcccagctctccccgttgttcttctgcagggtgtagctgtagccccgcgagatcaggccctggcgggggcaggctggacagtcaggatcccggcagggcctgagggcctgggagcccggttgccatctcagcccccgactcttggacctggggagccccggctcatcacttggaccctccccgtagagtggggaggggcatgcaggagaagcacatgtgttgaggctgccggcccagcaacccacctccatttccctttggggaaccttccctcccaattcccagtccctgtggtctctccttctccattcccaagctccagatggacatgtgacttggacctggccaatgactggcattcgccagccacagtcattggtatagggtggaccctggcattccctggccacagtgattggtgtaggatggacacgtgactcacagtgagccaatgagaacctggcctgggacttctgaggagggactggggttgctaagctggtggaacacaaggccagggcagccgaggtgggggcggcataggggtgccagttggcctgcaccaggggaagggttggcagagtgacaccaaccacggagacaggcacaggctcctgagaacggcgcctgaggcccgggatccaaccatgttaccccaaaaactttgtagtgatgtgaacagaggagctggccccacgcacctgctccccctcaaagtcacagagtgcctccacggggatgggcttgagcggagtctcccggcggtacttgaggggcaccacctgctggcctcgcttctgcagcccctgcaccacgtcctcatacttgtccagcaccttctcctggtcctggagagaacggggtcaggggcccaggtgagaccaacagccttccccctggtgggaggacgcagagcaggggctggattcagcaggtggggtgctgtggaggggcctgtacagggctgagggcaggcatggtgtagaggggtcccccgccccccgggccagcaggggtcctgggccatcgctcacatccagctcccgcagcagcagctcaatctggtaccggtccttgaagtcagggccatacttctggttcaggtccgagtccaccttgcgcagcagctcctgagcgtccttcacgtcttcgtgaaactaggggagaaggtggctctgttacagccaggaaaccactagaagcacctgggcttctgtcggaggcttcaagctcatccctcaggcggggctgggcctccggttcacctggagtccagcatgggaccctgtgctgagcctgaggctcctctgcgtggagacagccccaccctccctgagctggctccttaggggcctcactgggaaaagccaggtcccttcccacccatccatgagatgccacctctgtgacatgttttcttggatgtatcagtaagtcttgaggtgtctttgattcagttcctctctctgtactaggaacatccagacttaatactatagcttctttctaggttttgataatagcctcccctttttgttctcgaaaattctcttgcccattcttcagtctatcaactcttggttcactgtcagctatcccctgggctgagcacctgggctgcagccataaacaggacctgaagcccccactgtgcggctcagacagggaatgaggagtgacacggcgtcgcccacatccagctttccccagacacctcaatcctaagaattacccgcagcttcttaagaactctcattcctctggaaacagacaagtgtccagccacagatgagtggataaacacagtggtctagccatacaataggatatgattcagccataaaaaggggtgaagcactgaaaatgctacaacacggatgaacccggaaaacatgatgctcagtgagagaagccagacacaaaagggcagagattgcatgatcccactgattcttcatattcgttctaggtgtgacacttctggaacaggcaagtccatagagacagcaagaagaccaaaggtgacctggggctgggggagtgggaatggaaaacttactgcctaatgagtacggggttgttttttttttttttttttgaggcggagactcactctgtcgcccaggctggagtgcaatggcgcgatctcagctcactgcaacctctgcctcctgggttcaagcagttctcctgcctcagcctcccatctgggactacagatatgggccaccacacctggctaacttttgtattttagtagagatggggtttcatcatgttggccaggctggtcttgaactcctgacctcaggtgatccagtcgcctcggcttcccagagtgctggaattacagacatgagctaccgtgcccagccagggtatagggtttctgtttggggtgatggaaagttttgcaagtagatggtggtgatggttgcataacattgcgaatgcaatgaatgccactgaattgtacacttaaaaatgcaaactggccgggtgtggtggctcacacctgtaatcccaacactttaggaggccgaggcgggaggatcacctgaggtcaggagttcgagaccagcctgaccaacatggcgaaaccccatctttactgaaaatacaaaaattagctgggtgtggtggtgggcacttgtaatcccagctgttcaggaggctgaggcaggagaatcacttgaacccaggaggtggaggttgtagtgagccgagatggcacgactgcactccagcctgggtgacagggcaagactctctcaaaaaaaaaaaaaaaaaaaaaaaaggcaaattttgttttatgtatctgcatgtatattatagattttaccaaaattaaaaccctacacactcaccctgggccccatgtgacctggggaatcagactctggccctggtccccagggaagttggacaggggccggcaagcttgggacatgtctgcacacgccatcagaagcatgggtgctgggggcctgggatggctgccccgcaaggctcctggaccaaggagcacgaggccacacatgagccaggtaggcactgagcgctctcagagagtagcacccccggtgctggggggactcccaggaaaggtaagtacctggtggtagtcctccatgtacttgaggtggctctcctcgcagatgagcaggttcaggtactccttccagtctgcgtgcacagcctccatgtgcgcctgccaggaagagaaggggccggtcaccactgggcaggtactgcagacaccaagggagggactgctgggatattgggctggggcatggcgggggagggaggcatctggcatctgtctgggtgtggctaccacaggggtagccagcttctgctcaggagtgggaggaggagagaggggtcacgtcaaggagccaaacagggatgccacatacggatgcccaggctgtgcagtgcacaaagggcaagtgggggctgtggtgccttcggcaaatctgtacaaaggcactgtcatggaccgaacagtgtcccaccaaatccatgaccctggccaggcatggtggctcacacctgtaatcgcagcactttgggaggccgagcgggtggatcacctgaggtcaggagtttgagactagcctggcccacatgatgagaccctgtctctactaaaaatacaaaaattagctgggcatgatggtgtgcgcctgtagtcccagctacttgggaggctgaggcaggagaattgcttgaacccgggaggtggaggttgcagtgagccaagattacaccatcgcactccagcctgggcaacaacagcgaaactccatctcaggcggggttggtggcattgtgggggttgggaagaatgcgaccttatttgggaataagatctttgcagatgtcattagttaaggatcctgaaattagggtgagccctaaatccactgactgatatccttataagaagagaggatacagagagacatggggagagaaggccatgtgaagacggaggaagggactggaatgatgcagccacaagccaagggctgttggcaacccccagaagccggaagagcaaggaaggcacatgtcctggagcttccagagggaatgaggccctaagacaccttgatttcagacttacagcccacagacctctgagagaatgaatttctgttgtttaaagccactaagtttgttttaacttgttgcagcaactctaggaaactaatacagaccccacaggggcttcagaagtccaggggctgagggcagaagtgtcaacggatcaggataaatggaggaggcagagtcagacacagcaagaaagagacagacagacacaagatgcagcttgcaggacccccagctccggggtctgcccgagctccaggcggcccacaggcagcggccaaccagaagccaccctgggggaggtgtctggtctcggggtgcatgaacctcaatggagttcctcccggggtgctcggccgccagcagctggtcgccctcgctgtgcagtttgttgattctctcctctttggcctccaggttccggttgatgaaattctgcagtggggggcagtggaggggcctcagtgcccagcctggcggtcccgtgctccttccagggctgcctcctccctgatgccccaggcccccagaacccacctcatactggcgccggcggctggggtagtcgaggttgcggtcactccagtcgtactgcatgcggcccttggcctgctggtccagccagtacagctcattggtgcagcgctgcatgtagtcctgcagcgaactcaggtgctgctgccgggcctgtgatgctgcctgaaggggccggggcaaggaaagggctgcgtcctcagcccgctgccactgctcgcttccttccctacctcctgcagggcccagctatggctggcctgaggacaagcccagctatgggtggcctgaggacaagcccagcttagccacgtccaggccagtcccccttagacaagtcacctgaacccctgaaactc

SEQ ID NO: 2398 - protein, 1161 aa, Homo sapiens
MENFLPDFLSCITEDSPLGPFTEISSQSHSWLLSFTNMFQSMSPARWASSGDSSRPVSGWMTTMERRRWFSRCSRLTATEPRRFCSSSISRSLSLESLLRSSSSLSRDHSLESWLVPESATVMFRRSRVSVAAMLISDWSLRVSSCRFCLSSCNLWFSSLRKSSSLDDLELWNSSSESLASSRLTSTSSSRLLRLSSSRLLLSLWISCSVSPFSTWTLSESTTFSLTSAFSSAASFLRRVSSSPSRSCRRCCSSSSWSRSRACSRACCGSCCSTTFCVWVTFSRASASSCSSAASRCCNRCTSRSASLRACRSRSSSSSCRSSSVRRRCSRRSSARSLSICRSSTSMLSAKALASARRPGSSSYLTTSCCTTLSFTRESSSSFRAICSSWEALSLSRSTCFFCSSESFALRDATSSLLRSCSSAPRYFRSCSTSSRRRFATSLSALGSGRTISRTFSCTTTLAFSSSKAHIFRSSSVFSLWLARALAASSSYWRVRSLTSLSVAASFSTLSTSLTPLELVLEEAQLLLLLLPELVLALVVLLQLLVLCLQLGVILQFHHLFLCDLLLRPALLFSQGGHTLLQEEHLCLPGALLPPQCLQLLPQLQDLIRLGPVRLDAQDLLDHVLLPPVSGLLLQGTQLQLQCLQLLLQQLVLVLLLCQRPLQLLEALLQHGIRHLLEHLLPHHRFLRPLIPQGPDFFLGALDLVLQLPPPLSLLIQFLPDLPRLLHSRVRPIPLQGLMGHFYFRLLKQKWPPPTAPSPAFHLLAQVVETLAQLVHLGLLALQVRTVLLEAAGPVCSSTAWPPASSAPPHPGGTSGPVTHRPWPGGGRGGDGGATGQSSQSQAMTPTEAPWATDCRRVGKATGTLRSLARSALSCTARPCSSGGRRIPVMAFSCRSRSLATLSKPASSCRPCSTDPGPAPPPRYPQSLRRVALAPTSGILGLQHLIPLLQRAFAPSCLLPHAPVLAAQAGSWAIAHIQLPQQQLNLVPVLEVRAILLVQVRVHLAQQLLSVLHVFVKLGEKAAANQKPPWGRCLVSGCMNLNGVPPGVLGRQQLVALAVQFVDSLLFGLQVPVDEILQWGAVEGPQCPAWRSRAPSRAASSLMPQAPRTHLILAPAAGVVEVAVTPVVLHAALGLLVQPVQLIGAALHVVLQRTQVLLPGL

SEQ ID NO: 2399 - DNA, 3801 bp, Homo sapiens
  source (1)..(3801)
  CDS (201)..(343)
  CDS (375)..(561)
  CDS (650)..(1069)
  CDS (1336)..(1485)
  CDS (2371)..(2549)
  CDS (3412)..(3601)
  modified_base (26): a, t, c, g, unknown or other
  modified_base (250): a, t, c, g, unknown or other
  modified_base (274): a, t, c, g, unknown or other
  modified_base (880): a, t, c, g, unknown or other
  modified_base (1034): a, t, c, g, unknown or other
  modified_base (1137): a, t, c, g, unknown or other
  modified_base (3275): a, t, c, g, unknown or other
  modified_base (3277): a, t, c, g, unknown or other
  modified_base (3282): a, t, c, g, unknown or other
  modified_base (3285): a, t, c, g, unknown or other
  modified_base (3289): a, t, c, g, unknown or other
  modified_base (3292): a, t, c, g, unknown or other
  modified_base (3300): a, t, c, g, unknown or other
  modified_base (3302): a, t, c, g, unknown or other
  modified_base (3340): a, t, c, g, unknown or other
  modified_base (3362): a, t, c, g, unknown or other
  modified_base (3390): a, t, c, g, unknown or other
  modified_base (3397): a, t, c, g, unknown or other
  modified_base (3457): a, t, c, g, unknown or other
  modified_base (3519): a, t, c, g, unknown or other
  modified_base (3545): a, t, c, g, unknown or other
  modified_base (3624): a, t, c, g, unknown or other
tattcagtgccttcagtgattatcanattagtaaaaaactctgagctgtcggctgttgtgtcggcgtgtgtcgttgcgtgtcgtctcgtgaggctcgtccgtgctgtggtctcgtgtgttgtgtggctggtcgctgtgtctgggtgcggttcttggcggcgatgtgtggtggtggtgtgtgcgtgtagtgtgtggtgctgatgtcgtcggcgtctcgctcgctgtgcggcgcagtcgctccgtggtgttntttgggtgccgtctccgagttgtncggttcgctgttgagtgagtctgtggtgctcgatgtgttgtttgttgatgatgctgtgttgtatgtcgcgtgagcgtggagcgtcgttgtgctgtggtagctggcgtgttgcggtgtgggtgtgttgtgtctgcggcttggtgcgcctgttagttgtggtgtgggtgtgtggctttcgtttgctgtgtgctgtgcctgtggtgcggtgtgggcgttgggtgtgtgtgctgtgtggtgctggtggtcgtctcgttgcggtcgtgtctgtggtggcggttctgcttgcggtgggtgtgtctgttgggtgggttgcgtgcgcggctgtgttgtggtggtggtggtggttgtgcgtgttggtgttgtgctgtcggccagtctgtgtgctcgtgtgttcgcgtcgtcgtcgtgagctgctgtagccgcgtgatcggtgcgcgtggtggttgttgtgtgtgcgttgtgtgcgttggtgtggtgcgtggtgtgtgggtgtgtgttgggtgttggggggtttggatcggggtggtggtcggtggctttgtgtgtgtcgttgcgcgtggttggtgttgggtggcttgcggtcttgtctgcggtgatgtgtgttgnggggtttgtggtctagtggttcgtagtgtctgtgtagtgttgcggctcgtgttgtgtcctctgtgtgtgcggtgtgcgtgcgggcgcgtggtagcgtgttgcgtagggtgtgtgtctggtgtgtcaggtgtgttgtcggtggtgttcgcgttgngtgtgtgtgtgtcgtcgtgtatggagtgctgtgtggtgtgcgtatgtgtgtagctgctatgagctgcgtgagctgttgtagtgtgttagtgtgcggcaggagngttctgcgctgtgagtgtggtttgtggtgtgtcggtgttagtctgctggtgtcgtgctgtgtgttgtgttcgtggtgtgggtgggtggtgtgtcgtcggttgtggtgtgctggtgttgtgtggtgcgttgttgtgggtgaggtgtacggtgtgtgtgttggtcgtgttgtgtcgtgttcggtgcgtggtgcgttgtaggtgtgtggtgctagtgtgttcgtctgtgctgcgcgtcgcctgtttcgtggtgggttggtgtgttgggtgtgcggtgcgtgtgctgtgttgtctgtctgtgtgtggcggtgtgtgcagtgcgtgtgcgtgtggcgtgtctgtgcagtgcgtgtgcgtgtggcgtgtccgacgtttagccaaaaccctcatcatctctgccccctctgcaaatagagcccagccttctccatggtggtgaagacgccagtgtgactccacgacgtactcagcgccctgaggtcaggcacggcagctcacacctgtaatcctagagtttgggaggccgaggtgggtggatcatgaggtcaggtgttcagaccagcctacacttgtgaaggtagcattacatattagcagattatcaaacatgaggccctcctcaggggatctcttggaatcccacagtttatagttcattggtcagaagatcagtggaaatctgggacttgtgactggcacctgcagtgggacagtggctaactgatgtgctgtgctatctgatgatgtgtcagactgaccggccttcatttacacagcaagccttcctttcaggaacggctgcaaaacggaagcctaaaacagtagatggtgacagaatggtattgttaccagcagggaaatggcaagctcgccccctggtgacagctggggagacacagaaaaagcaaatttttttttttttttttttttttttttgagacggagtctcactctatcgcccaggctggagggcagtggcgcatctcagctcactgcagctccgctccgggtttcagcattccgggccaaggccgaggtgctaaaaaattcgagcccagcagctacacaaagaacagcagaaaggtgtccaacccttaacatttgggtaatgtggtccaccctcccttcccagggaacaatctgcttgaggcttggcaggtcctcttcttgaagcttgactgcatgccttgaagtgcaccttcgtggagattgagaaccgaatacgactcactatagggcgaattgggtacacttacctggtaccccacccgggtggaaaatcgatgggcccgcggccgctctagaagtactctcgagaagctttttgaattccgggccaaggccgaggtgctaaaaaatcgagcccagcagctacacaaagaacagcagaaaggtgtccaacccttaacatttgggtaatgtggtccaccctccctcccaggcaacaaactgcttgaggctggcagctcctgtttctgaagactgatgcagcccttgaaggtcaacctgctggagcaaaaaaacttgggacttgaatttgtagctccatttacatggatccattgccccagctactggagtatagcctacaatgtttatttcagtcaatattcctttatctgggtgttctgtacaatgtttattacagtcaatattccttcatctggatgttctgtgaagatagccatgtttatgggggtcttagttttcaaactctggcaactctgtgaaaaataggagcaaactagagagccctggagattggtagtagggaagggaggatagcaggaagtttgaaaaattagcaaccccggggcctaaaggaatcagctgtcatcattttcatcattaataatttgccgggtcggtctttgcaggccagtagagcagtgatgtctgtgattgaggtgttagaaatatccaagctctctaatcttggcaatgaaggcaacttcagccaggtcttcattgtaaaagagaacattcgtgatgcttaaagctcgaaggccagaaggcggctgaagcagcgctcgtaaggatcctcgagggagagagttaatgaattcaaagctctcgagagtactctagagcgcgggcatcgatatgactgcagtgagtctacctcgcctaaacgtcacgtncnttacncanatcngantacaacangnatctagatcgaattcgagcacacattactcgtgtgtanactaagcgtgtcatctactagntctgcatgtcattagcatcgatcctcgngtactcncgtgtccatctcagtctcggtactacgtatcgacctatctgcattagtacatacgactanagcactgcatctatcgtatgtgcgtacgctcctagataccgcgtcgtcatcatagtcttcgnctcgcgatgtgacatactagtgctcntcactgtacgacgtcactcagtcggatgtcgattactcgcatccgtactactatagtcgcgtctaatctagtctatgcnactgcgtactactgcctgtcactgctcgtaatcactattctgtatatacctacatgactatcagatgtaacgacagtcgtcacgcacctgcagatacttctcactgtagctatgacactgctactctgatcgttgctctacatacatatgacgatacagtcacgtgcgtacgtcgtc

SEQ ID NO: 2400 - protein, 422 aa, Homo sapiens
  MOD_RES (17): Variable amino acid
  MOD_RES (25): Variable amino acid
  MOD_RES (187): Variable amino acid
  MOD_RES (239): Variable amino acid
  MOD_RES (375): Variable amino acid
  MOD_RES (396): Variable amino acid
  MOD_RES (405): Variable amino acid
MSSASRSLCGAVAPWCXLGAVSELXGSLLSESVVLDVLFVDDAVLYVAWRVAVWVCCVCGLVRLLVVVWVCGFRLLCAVPVVRCGRWVCVLCGAGGRLVAVVSVVAVLLASVCSCVRVVVVSCCSRVIGARGGCCVCVVCVGVVRGVWVCVGCWGVWIGVVVGGFVCVVARGWCWVACGLVCGDVCXGVCGLVVRSVCVVLRLVLCPLCVRCACGRVVACCVGCVSGVSGVLSVVFALXVCVSSCMECCVVCGASVFVCAARRLFRGGLVCWVCGACAVLSVCVWRCVQCVCVWRVCAVRGELGTLTWYPTRVENRWARGRSRSTLEKLFEFRAKAEVLKNRAQQLHKEQQKGVQPLTFGLGTTYRPICISTYDXSTASIVCAYAPRYRVVIIVFXSRCDILVLXTVRRHSVGCRLLASVLL

SEQ ID NO: 2401 - DNA, 10033 bp, Homo sapiens
  source (1)..(10033)
  CDS (201)..(267)
  CDS (1110)..(1244)
  CDS (1742)..(1902)
  CDS (3203)..(3342)
  CDS (5266)..(5414)
  CDS (5495)..(5791)
  CDS (6598)..(6796)
  CDS (8013)..(8879)
  CDS (9542)..(9833)
  modified_base (3973)..(4072): a, t, c, g, unknown or other
  modified_base (9980)..(10033): a, t, c, g, unknown or other
tgatatccaaccaaggtagagtcacaggtgaagtggacagctcctgatactcctctacatgttcacatgttcacagccatctctaatcctcttcctgtcattcttttctccacgtcctcccttcccccagcaaagtccaggttctctatggggggacagacctgtttgactatgaagtgcgcaggacgttcaacaatgacatgctcctggccttcatcagcagcagctgcattgctgccctggtctacatcctcacctcctgctcaggtagggcttctctcaagccagccccctcctcccctcccagggtgctcctgtctgcccagagcctgccttctcaagaatgctgcaatactcttgagcccagcatgtcagagctggggacacagggatatgcacacaaatcatcttccaaccccaaacaggcagactgaggcctggaggcaggttgggctgtaccagcccgggtcacaccctctaccctgggcccctgcacagttggaccttttgcctgttgaccatctttctcctattgatagccttgtgctggggagtctggggtattgtattcctttgtggattactttgtagcctattttggagtcccaagtcaactgccatctgctccccgatcactttttcacctccgtgtgcccctggatactagctgctgcttactcctgtctgtatacagtaggcacactctactgcccaagcagacaagacaatggtaatactttccaaaatggaaaagacattcattcgtccatacaacagatatttactgggcaccaaactatatgccagatgctgtaaggtgccagggatccagacacagttcctacccccaggtaatatgtaatgttcacaaggctcttgaggtaaggtctgcaaagaggaggacagtctgccacttgggcctcctgcccggtgccctttttgggtgtggaaaacagaattggccctgtgcctgtgctgggaacagagtggtgaatggtgaccagggttggggagaagagacaggacccagctgaggtcagggactctagtggggtttgagtcccatgagggtccccccaccgtctccctgtgtctcttaccctgcccagtgttcctgtccttctttgggattgccagcattggtctcagctgcctggtggccctcttcctgtaccacgtggtctttggtatccagtacttgggcatcctgaatggggtggccgccttcgtgatcgtgggcattggtgagtcgcctctgttgtcatggcagtgcgcctcccacatgggaagtctgccccatcccctttctccctggatacaaagcctggcttccctgggggctctacacagcgcctgctgaggcctagagccttggagtgcagggttagaatgtgggtggtgggcggatccttggcatagggtgagtggagagagcaggaaggtttgctggatggaggtgaggatggtgggaaaggcccaggaagtgtgggaaggaggtcaggatgtgggggaaggcgcctagctctgggtgaggttggggccaaggagtgtggtgggtggggcttgaactcttggtgggaggagccaatcagaggggtctctccaaactgtaagctcagaagcaggactcctgcagcctgacctcccaggaggccactcacacttggtctagggccaggttgggcctaatcctggagacagcagaataatcctgagcctggctggggactccctcccacaggtgtggacgatgtctttgtgttcatcaacacctaccgccaggccacccacctggaagacccacagctgcgcatgatccacaccgtccaaactgcaggcaaggccaccttcttcacctccctgaccacagccgccgcctacgcagctaacgtcttctcccaggtgcggacctgtcctccattcctgtcctggcctcccacacgctcatgcatacctagccgctggtctctgcccttcccaccaccgcttgagtggccatatagccttcacctcaaggtacttgccctggctctagagttcatttttgtcacgaatcacccattacccaaacttaacaagtgggaatattataataatccagacagcatgcattagggatcctcagtagtagtaatccagcctccaccctggaggacatttggcagtttccaaagctctttctcgtttaatcttcattaccacggtaattgacaaaggtacaattaccatcctattttccaaaaaagaaacttggcccctgagaggtaaagtgacttcctcaggatcacacagcagataagtgagaagcctgaccaagtccatagtgattccccttctgcctgcttctggctgcattttcctcccttgtgctgacttcctcttgctgcctctgagtggggcttaggagaaggcattgagcccaggctgggtccttggtacagaaagacagtgaattggcccaagtctttgagaaactttacgacctgggctgagtagcccctctggaaaccagtagatgctttaggattatccaggtccttctagagaatcacttctagaaggtaggcagagctgggttcagcttctgcagtgtgaccttgggcaggctgtgtgacctctctgagcctcgctttcctcatgtgtggattatccagggactgagatgcgaggatgattgtgaaagtgtttcacagagtgtaggctgctctgttggtggctacagcttacttccaactagcacctccctgtgtggtccctgtcatacttctggaacatacccattgctcctagtccccagggtccctgccttcgtcatgtggcagcattctctccctccccctcactagcacatggcctggtctagcgggatgtgtcttcctctgtccccattcattcgcgtaatgacagctactgaccactgcctctgtgccaggcactgttctgggcagtggactgcagatagacaagagcctccacttgaggtggggacccttcctgtgctgctgtgtcctctgacaccagcccttggctcctggtgtcctgtgaggctagtgcctggcattctggcagcctgggcctcctcctactgcctcagtctgggccagatctggggtcctgagtgtctctggctgcagggggcacccaggccccctgactgcaggtccaacctgtcccacatccctctcttcctttccatcaccagatcccagccgtccacgactttggcctgttcatgtctctcatcgtgtcctgttgctggctggccgtgcttgtcaccatgcctgcagctctgggcctctggagcctctacctggcaccactggagagctcctgccagaccaggtaagtcgggcagggcctccacccacagcagggtatccacaacaggcctctatgagccactcagtgcagcaacctctcttccaaaagccttctgtatgaccagtcctttgctaggcagggaacagggaaggagaagatgcttccatccaataactgcaatttgggatcaccagtgtcaccaggaagtgagcaaagcacttgtgtccaagatcttatgacatcaccattcacttcccaaagaaccctgggagctgggttctcttgctgtgcccattttacagatagaaaacaatgactcagggaggttgggcagctttttcaaggtcacctatttagtaggcagtagagcctggatttaaacccaagaactctgcttccagatcccatgctcttagccaccatgttaagtgtcctcaggttctcatctttagatgtagtgagacgtgtgcagagttgaacgggtcagttcagagttgctgctggaggtttagggggaaagaccttgtgggcctggtggttgggaagatggaggtggatggtggtgaagttgtaatcagcgcctgggtgactgtcctggggttgggagcatgcagggtctctgggcttggaacagggcccactcagtgtggannnnnnnnnnnnnnnnnnnnnnnnnnnnnnnnnnnnnnnnnnnnnnnnnnnnnnnnnnnnnnnnnnnnnnnnnnnnnnnnnnnnnnnnnnnnnnnnnnnntgggtggctgcctggggttgggaggatggagggtctctgggcttggaacagggcccactcattgtgataaaggccttggtcagtcgtgttcagggacccatgacaatgtccgctcgcccatggtgagccccagaggggctggagggagagaagggcccagcgaggagcttagacttgggcctgagatggactcctcagctctccccactcacatcttcacccttcaggaccccgctgtggtggtgcaggttggcactgcacacaggtgccccggcggaggcactgctctgtgtaccatgggtgctcagatttgactgttttccgtgacagtttcatgatatagaagcagcgtcatggggaaagggcgccttttctgatctctacagagatgcaaaataagccccacgtctgccccccggcctggggctgtctccccagtggtcctattgggcacagtcgtcttcccagtcagtcagatgtgggcttcaagcccagcctcctccctcggcagccatgaaaccctggacaggtgacttcacctctgcatctcagtttccttttctgtgaaatggttgtgatgtcagcagcactgtgatacctgggttcatctgtgtgtgagtcccatgaggattaagtgagataatccacgcagggctcccagctcactgctggcacgtggcagtggtattagccacacacacagcgctcgtatcagccgtgaggattattctggtgcccagtccctaggttgagccgcgtctctcatgtgttcactccagctgagacctcggccacgcagctacaccctcagcccagccctgttccctcctcctggctcccctgagtattaagttggaggcagagcccctgggccacacagcagcagaggaatgagtcccctgatttgatcaccttagtgcccgggccactgtgtgttgtcatcccctcttcctgggtaatgtttgctgtcaccatttgtctctctggaggaagactggcacctgagggccctggggtagatggtactagaaagaaaccaggtgaccagctcccagaagtctggggtgctcatcctgtgtgtgacgtcagcagcactgtgatacctgggttcatctgatcctcaggaccctgccccaccctccctgggtacccaggaccctctggttcacccctgtcccctactctctccacagctgccaccagaattgcagccggaagacctccctgcacttccccggagacgtgtttgccgctcccgagcaggttggaggcagccctgcccaggcccccataccctacctggatgatgacatccccttgctggaggtcgaggaagagccaggtgagagctggcacaggcctgccctactgaccccagtgagacccagcgctgcctctgccaggggagtaacacttgacaagttggtcctgaggctgggggccggacaagatggcctgtgggcttcctcaccaggcatctgggcttccctggaagcgagcgtggaccacagtgggctttgattcaggctctgacgggccactgctctgccctggcagtgtcactggagctgggagacgtgtccctggtgtctgtgtcccccgagggtctgcagccagcctccaacacgggcagccgcggccatctcatcgtgcagctgcaggagctgctgcaccactgggtcctgtggtcagccgtcaagagccgctgggtgattgtgggtaagtgggccctccggccctgccccctgtctcacagctccacccccaaaacacacaggaactgggagcccaccccctctcgcagatgccccagggtcagaggcctgggctggggtctctccctctctgaccccccctctttcctgtgcagaatgaagccggtcatggcggctgttactcattggcccctgctgtgtgccagccactcacactgggcagtagcacagagcatgccacacatgggccctggagttagacccacttgagtctgagtcccagtttggccgcgtcctagctgtgtgaatttggctattccagtccgtttagcactcagttcctattctgtaattgaggatgagaacggtggctaggaaggcagctgtcagtggagagtatgtataaagacctcagcccagcgcgtggcgtgcggtaagtgctcagtgaatgtcaagtgctattatcattgtcatcttcgacactatttcagagttgtgtgagatcaagtagtgcaccagctcgtcataaactatgaggtgctctgaggtggtggccgcctcttgtccaggagtattagattatagcttatagtcaaaccccatgggacaccacaaagcaactgatccctggccctgtaggaccatccccagcaagctttgcccacgggctggcatgcagggccttcccccgcacccttaggacacccgccccccaacaaccagagcagttgtctcccggcactttggagccccactgggaacagaccagctgggcccagccccgcctggtgtagcgccctttcctcacagggctgttcgtctccatcctcatcttgtccctggtgttcgccagccggctccgccccgccagccgggccccgctactcttccggcctgataccaacatccaggtgctgctggacctcaagtacaacctgagcgccgagggcatctcctgcatcacctgttcaggtgaggcttctagccaggctgtccctggcccgctcaggtgtccgggtcccaaagactgttggtctgagagatgcaggatccagggtccccatcaatgccagacctcaggcaaatcccactcccctctgagcccccatgttcccacagttcattcaacagatgcctgctgggtgcctgctgggtgctggctctggggaggtactgtgggcgggaggcataggcttcccaagctcagggagttcacattccagctctagggcccggtcactgtaatagtagatctgagctttggcggaggaagaatagggtgtcttagaggcccacgtcatggaaggcttcctggaggaagtaacgtctaggccacaactcacaagaattgggaggagttagccaggctgggaggggagaggaggaaagaagaggggtcaaccaggtggggaggggaaaggagggaaggggtggggttaaccaggctgggaggagaaaggagggaagaggaggggttagccagttgaggaggggagagagggaaggggtggggttagccaggctgggaggggagaggagggaaggggttagccaggctgggaggggagaggagagaagaggagaggttaaccaggctgggaggggagaggaggcaggagtctaggcagaggagagcaccagaggtgggaaagaccaatgccacatttgagagaggcagctgcaggaactaagtctggcccagtggactgggatagggcagatgggctgaagtgaggggtctggattttattctgattgtcactggaagctagtcacgtggtttaagtggagaagcggggtgagggagtctcccaggtgctgtgtggaggtggactagggcactggggtggaagctagctgggaggctgagagttggtggtgctgggaccagcatgctgatggcagcgatggtggagtcaagaggtttttaggaggtggtttccataggacttggtgacggagtgggagtcgggaatgagccaggagggaagacagagatggctccttgattttgaggtagctggcccaggccgcattttacagagggggagcaggcgaagtcaacccaaggtcatctgattttgccagggcagttagaaaccaaatgagaagacgcctgggtgagtgcttccagctcacaggagcagatctgctggtgctgtcattacctttatttaattagggcggtgctgagatcaacctggccttccccttggtaatggcagccaaatgcgtgataatccactgcagctccgagaggcaccagaagagcccctcacacttcggagccagccctggccacgtccccagctcctctaccccactgccaggatgtggcattgctccccatcatcaccgccgccacaggcctcctgcccacagatggacaaaccccgaagctccctgacaacatctggggccaggacccagccagagcccagccaggacccagccagagcccagccaggacccagccagggcccagccaggacccagccagagcccagccagggcccagccagggcccagccagggcccagccagggcccagccagggcccagccagggcccagccagggcccagccagggcccagccaggacccagccagggcccagccagagcccagccagggcccagccagagcccagccaggacccagcgagagcccagccaggaccctagccagagcccagccagggcccagccaggacccagccagtacctagccagaacccagccagagcccagccagagcccagccagagcccagccaggacccagccagagcccagccagagcccagccagagcccagccaggacccagccagagcccagccaggacccagccagagcccagccaggacccagccagagcccagccaggacccagccaggacccagccggagcccagccagagcccagcccctactccctgtgcctcttcctctgggaactgcctcttggagggaccccttcagagtacagcagagtgcttcggctttacaaagggcaggcgaggccagaacccagcggggctgcaagtccctccctgggcaggtcctttcacctctgctttccactccatcaagtgggtttcatgggaacagcctcaggatggctgtgaggattaaaactttgaaggtgtagttctctcatttctaatttaaaaaacccaaaggaagggctaacacacaacgcttgaggcaaaacaggaatatatgtctcccaccatgtctgccagctgatgaccttgggtcactctaacagtcactcctgttaattggatgcagaggatgtgatgtcccacccccgagggaagtgtggcatcatctccacccgacagaggcggcagagtggcacagagagggtgagcacgggggcagagtggcacagagagggcaagcgggggcagagtggcacagagacagcaagcagggggcagagtggcacagagagggcgagcagggggcagagtggcacagagagggcgagcagggggcagagtggcacagagatggcaagcagggggcagagtggcacagagacggcgagcagggggcagagtggcacagagacagcaagcagggggcagagtggcacagagagggcgagcagggagcgtttcagtgtttttctctgggcaggctgatggtgcctttctctgggcctaaaattcctataaatttggtatttgattttttaaaagttctttctagtttctttctgacccctgacacccaccccctccagtccctgggccccagttcctgagactgtctcagatcccagcctcttccctctgcccatcgggcccaggccaggatgtcctgctgtcctgctgtccttgacatggcgctggggggcaggtctgttccaggagaagccccacagcctgcagaacaacatccggacgtccctggagaagaagaggcgaggctcaggggtcccctgggctagccggcctgaggccaccctgcagggtgagcactgggggtggagggtggggaaatcctccctggtgctagggttgagggccctgtaaggagagcagataaaattccttctggattctccttcaagaaggagattgtgtgttcctggtcactgcagaggagctggggatggggggtgaatttggggccctcaccttccatccccccaggacactccgctcccccccacaccctgnnnnnnnnnnnnnnnnnnnnnnnnnnnnnnnnnnnnnnnnnnnnnnnnnnnnnn

SEQ ID NO: 2402 - protein, 768 aa, Homo sapiens
MLLAFISSSCIAALVYILTSCSVFLSFFGIASIGLSCLVALFLYHVVFGIQYLGILNGVAAFVIVGIGVDDVFVFINTYRQATHLEDPQLRMIHTVQTAGKATFFTSLTTAAAYAANVFSQIPAVHDFGLFMSLIVSCCWLAVLVTMPAALGLWSLYLAPLESSCQTSCHQNCSRKTSLHFPGDVFAAPEQVGGSPAQAPIPYLDDDIPLLEVEEEPVGPEAGGRTRWPVGFLTRHLGFPGSERGPQWALIQALTGHCSALAVSLELGDVSLVSVSPEGLQPASNTGSRGHLIVQLQELLHHWVLWSAVKSRWVIVGLFVSILILSLVFASRLRPASRAPLLFRPDTNIQVLLDLKYNLSAEGISCITCSGEASSQAVPGPLSQMRDNPLQLREAPEEPLTLRSQPWPRPQLLYPTARMWHCSPSSPPPQASCPQMDKPRSSLTTSGARTQPEPSQDPARAQPGPSQGPARTQPEPSQGPARAQPGPSQGPARAQPGPSQGPARAQPGPSQGPARAQPGPSQSPARTQREPSQDPSQSPARAQPGPSQYLARTQPEPSQSPARAQPGPSQSPARAQPEPSQDPARAQPGPSQSPARTQPEPSQDPARTQPEPSQSPAPTPCASSSGNCLLEGPLQSTAECFGFTKGRRGQNPAGLQVPPWAGPFTSAFHSINPWAPVPETVSDPSLFPLPIGPRPGCPAVLLSLTWRWGAGLFQEKPHSLQNNIRTSLEKKRRGSGVPWASRPEATLQGEHWGWRVGKSSLVLGLRAL

SEQ ID NO: 2403 - DNA, 3605 bp, Homo sapiens
  source (1)..(3605)
  CDS (201)..(296)
  CDS (2168)..(2565)
  CDS (2604)..(3405)
atgtgaaatccttttcttttgtaccgtgttcgctatgccagcggctcagaagagcaagaggagccctgacccgccactgctttgtctgtggagtgggttttgagggctggggaatggctggatgacccccctctcttgaagatgaacacaaatatttctaaaagtggctagcatgctattgttcacatatttgggacccaatgaatgaatcaagagggggcagacaggctccagaggcagaatcagaggccacctgcaagcagatgagccgaaggacagaggctgatgagacgagggtaaatgagtgatgccgccacacacagcaacagcctccaccctgatgtcgcacccgagcagctcttggggagcgatgtctccccaccttaagtccagctcaggctccctgacgtgcacagcctggctgcacccagagcagacccggtgggccacccatggggcagacccagaagtgagtcagcacccagtgtctcttaaaaggcccagtgtctcttcaaggctgagtgcggtggctaacacctgtaaccccagcattttgggaggctgaggtgggtggatcacctgaggtcaggagttctagaccagcctggccaacatggtgagaccctgtctctacaaaaatatgaaaattagccgagcatgattgcgggtgcctgtaatcccagctactcgggaggttgagacagaagaactgcttgagcccgggaggcagagattgcagtgagctgagatcacgccattgcactccagcctgggcaacacagcaagactccatctcaaaaaaaaaaaaaaaaaaacccaggaccagacagaagcctggaccacaggcagctgttgacactgcaggagtggaacagcttctatgagcctagcccaaacatccttcagctacaacagtttgggccttggcttggtctcagctggagagagatcaccttctcttctctgaaggttgactggggagttgggggcagacgtgggtgtggcaggtcttggaggcctctataaggccagggggctccatttcattccacatctcctttctgcacatgtctgagttgtgcgtagttttcctgagctgctcatggtattatgtgacataggattaggagttattcttggtcagccccctattaccatagtcccttggggtaaaattcccatgcctgccatcaccataggacttcctatgcatcccacagccccctgtaaacacagaattgctgtgaatgacaggaacagccccaaagtgaagtcaactgacacaatgtgttctagagagaagacaagacattaagatacaagtgctgaaaatccaggagtcaatatgatttccattccaaacccaagctctcagtacacagacacacacacacacacacacacacacacacacacattcatgaattcttctcagaaaaaaatagtagttaaagctttaaaaaatatgaaagcagtccacataattggccaaatagaagttccttcacccgagtccaataatcacatcttctataatatatactcacagtgaggcttttttttggaaggcggcttttcaaatgtgtttattagaatgcacgctgactttgctataattaaaatacagttatgctgacatccactgccctcattagcatgcgtttcttccccgaggttttgtcacaccgtcaaaaaatccttttccaaataggtattcacagctgattgcccgtcaggccaaggccccccagctttcagacacccgtccattgtgaaatgcactctggccccgaccccagccaccaggccacccaacactggccgcagcagtgggtgagcaccagcacccccacgtctttgccactgccctgctggtctgagtacacccctgaggattgaggggctctcccacacatactgccccaccatgagcagacccagggcagtgggcaagaaattgaacctgtcttctagggtgggaggaggggtgtcttctgcgagacacgagttgcccctcagccctcaaccggctttagtcctgagtctgagcggtgagcttaagagtggccggagcatccacgcaacatgtctcccaactggaccaatgaagagctcagccaccattagaactgtaaggcacccagcaccccccaccgcctcgcttcagcatctgcgaggcctgtaccctgaggtcccttgctctagggcccctctgctcccttccccgggacagctagagtcctacctgctcgtgaggccacttcagcctctcttctggggtctggtcttggacttgaagcctctctgggggtctccggggtgcttggcctcgggaaggaggttcagcgacttgggcctcgcctcttgcctgctggggctgcagctggccttgatgggtgggcagccctctgcagagtccgcaggccctggctcaggtccatgctcggggatggcctcactggtgctggtgatgctggtcatactcaagcttatcttgatctctgccacgatctggtcgatgtcctcctcctggtcctccaggtccccgtccccgcacctcagggggtaggcagaagcgctggtgttcccgttagcctccacagggtagtagtcctggtagccctctttgctgggacagtagtgaccgtcttcttcctggtcgtgggcctccaggacggaggacacatcctccgtgatgggcagttggccatcagggtagtcctggctacctttagccccgtgaccatgggggtgcaggcccgcccaggccgtccagtccactgcatcctggcacccgtcagtgtccataggatgcgcgccgtgggccaggtacacctgcccattgcagtccatgccctccaggtagctttggtcctcagggcagtagcggatgtagtaggggatgccctcctcctcctcagggaggccctcatcatagtcgtcctcctcagaggtgtcgttcacgtagtcggaactggagtccccatcggggctgtggttgtggcactcctgcttcttgggcgtggggctctctggccgcagggtgaccagctccaggccctcgggcacatagtcctccaagggcagctccacgtcctcgctctcgggctcctggtggtgggggacaggacccggccttgccctgtggtccaacatgctgctccccgcgctctgacgcttctggtgggccatggtagacgcttccggtgggccatggtagactcttctggtggggcatggcgggcgctcacacagccatcattccccagaggcagccactgtgtggaggaacattggcaaggacagagtcagaaccccacaaagcctggccacgtgtggggccactccaccgccacagcacctccaaccacgttctcccacagcactgtgaaaaatgatagctgaagattttcattgccgcaatctcttaaaaaactggaaacaacctaagtacccataaataagagaatgtttaaaaaaatgacggcagagttcacgtgctggaagagttggtggcatttttaaagaggcagggcaacacgtactacagtgagggattttacaggcctatttttgagggaaaatggcaagtgagctacagcaag

SEQ ID NO: 2404 - protein, 431 aa, Homo sapiens
MNESRGGRQAPEAESEATCKQMSRRTEADETRHLRGLYPEVPCSRAPLLPSPGQLESYLLVRPLQPLFWGLVLDLKPLWGSPGCLASGRRFSDLGLASCLLGLQLALMGGQPSAESAGPGSGPCSGMASLVLVMLVILKLILISATIWSMSSSWSSRSPSPHLRGVVVLVALFAGTVVTVFFLVVGLQDGGHILRDGQLAIRVVLATFSPVTMGVQARPGRPVHCILAPVSVHRMRAVGQVHLPIAVHALQVALVLRAVADVVGDALLLLREALIIVVLLRGVVHVVGTGVPIGAVVVALLLLGRGALWPQGDQLQALGHIVLQGQLHVLALGLLVVGDRTRPCPVVQHAAPRALTLLVGHGRRFRWAMVDSSGGAWRALTQPSFPRGSHCVEEHWQGQSQNPTKPGHVWGHSTATAPPTTFSHSTVKNDS

SEQ ID NO: 2405 - DNA, 1948 bp, Homo sapiens
  source (1)..(1948)
  CDS (201)..(572)
  CDS (789)..(1046)
  CDS (1117)..(1203)
  CDS (1290)..(1748)
  modified_base (290)..(389): a, t, c, g, unknown or other
  modified_base (584): a, t, c, g, unknown or other
taaacatggttgttgcaccaagtgcaacagacagtgtggtacaaacagtgcagggatcaggggaaaacagtgtgtgtgcacaacgtgcacagacagttgtacaaacagtgcagtggactggggaaaacaggtgtgtgtgcaccaagtgcacagacagttgtacaacagtgcagtggactggggaaaactgttgttgcccaatgcacagacagttgtacaacatgcatgaaatgggaaagctgtgtgtgcaacatgaacgacggggggttttgggtgtgggtttgtggtgnnnnnnnnnnnnnnnnnnnnnnnnnnnnnnnnnnnnnnnnnnnnnnnnnnnnnnnnnnnnnnnnnnnnnnnnnnnnnnnnnnnnnnnnnnnnnnnnnnnncggtcggcggtgctgcacgtctctcatcggatcgtcgtcttgtgggttcgtcggctcacgtctgatcggctggttctaggtgtcgctgactgtgactggtctagtgttcgttcgttgcttggcgatcgctggtttgtcgagctatctcgattggctgacggtctatgcttctgcgatgtcgatgtgacttagtcnatcttatagagacagagagaaaacacaaacaaacgaacaaagaagcgacaacactgttgatgttcactcttcatctttataactctttgctcttgttctgagccattgtacgtacggctcgttgcttcgactgcacgtcgcgtgcctgtgtaccccgtacctacttccgtctggctagtgtctatccttcgatgtctacctcagctgtgccgcggtgatcacctgtactgtgttcatgtgtcggtggttcatgagtgtgtcacgcgtgagttgcgctcgtgtcctctgtgtgtgcctgtgtcgactacctctgtagtgtgtctctcacgtgtctctgttggttctatcggtgtcattcgttgccatggcggctctatgtccacgtgttgtctcctgttgttaggctcctgtcgtgttgtcggctactgctccctcgttcgtgtctcgcttgcgctcgtgctcgtgcgtcgtctgtgtgcccactatcttctcgtttggtttcctcgttagctgcactctgtccttcgcctagggtgctgtctacatctccgtgtcgggtgctgtctcatcgtatcgtaaggttccctggctcggtttgtgtgcttcttccgttgttgtggtgcgtgttagtctctctctgcgtgtgtcttctgcttgctgtgaatgtttacgtcctgctgttgtgcggtgcgccgttcccgacagtcgtggttgtctccctcgttctgtgtgcttcgttctctacttctgttgttctatatgtctgtcgcctggtgtgttgtcctctcggcggtctacttatcgccgctatgtgagtgcctctatacgttgttcttcggtgtgtgtccttcttgtttgtgtgcctttgcctcgcttagtgtgtggtccccctcgttccgtgtcgtgttggggcccctgttgttcagtgaccgcgccgttatggagggccagcaccgttcggtctgggctgtgcctctgtcttgggtcagtcccggagtgggggtcgcggcagatgtccggttgtggtggtcctcggggggtgatctccgctgttgttgtgcgcccctgtatcgctgtcgtgttgtgtccgtcgtggggtacactccgcgtgattgtcgtgtccactacttgtcctccaggggtgtcctccttgtgtgccactgaccgggacatagcagggtctgattgtgatcgccaatgtatggctgcgtgtgtgcacttgatccgagatacaatgcatgatgagatcgcactgaatgctggtgtgtgcactgatgggacaaaccaaggctgatgcgacgctatgatgctgggtgtgctctgacggaaaccaaggctaatggacgcatggacgctggtgttgc

SEQ ID NO: 2406 - protein, 391 aa, Homo sapiens
  MOD_RES (30)..(63): Variable amino acid
MHRQLYNMHEMGKLCVQHERRGVLGVGLWXXXXXXXXXXXXXXXXXXXXXXXXXXXXXXXXXXRSAVLHVSHRIVVLWVRRLTSDRLVLGVADCDWSSVRSLLGDRWFVELSRLADGLCFCDVDLCRGDHLYCVHVSVVHECVTRELRSCPLCVPVSTTSVVCLSRVSVGSIGVIRCHGGSMSTCCLLLLGSCRVVGYCSLVRVSLALVLGAVYISVSGAVSSYRKVPWLGLCASSVVVSWLSPSFCVLRSLLLLFYMSVAWCVVLSAVYLSPLCECLYTLFFGVCPSCLCAFASLSVWSPSFRVVLGPLLFSDRAVMEGQHRSVWAVPLSWVSPGVGVAADVRLWWSSGGDLRCCCAPLYRCRVVSVVGYTPRDCRVHYLSSRGVLLVCH

SEQ ID NO: 2407 - DNA, 2265 bp, Homo sapiens
  source (1)..(2265)
  CDS (201)..(295)
  CDS (1318)..(2065)
  modified_base (820)..(919): a, t, c, g, unknown or other
  modified_base (2264)..(2265): a, t, c, g, unknown or other
gcgtggacctatggcccaagggggcgctagactctgcggctccatttgaccttgaataagtagcgagatggacagcagattcttgaagagaatgttcacccaggggaacaagcgacagaacggaggagattggacttgtgacgagcgctagcgatctccagggaggcggtgttgcgaaggggagagcgcacgagggttcgatggaggaggaccacgcggaccatgtaggccctacgatggatatgaataagagtaggcctgttgctatctatgtgtccgagtgctcggcgagagggtacgtgtgccggcagagaaaagtgtaaagcgtggatttagagtttctacttgctcccgccgtgtgagaatgtagcgtcatgcctggaatagctgcgagtatcttgttgtgtgtagcatagcagcagtcaacggacgggcgctcatgcactgcaagttatgaaccatacagagacttgtcgtctgtagtcaaatgacaattgtctggcctcgagcactgccctggtcagccctcatcgtacagtgccacttgtcgggtaggtgggttggtgtgcgagggatggaactaaaaggctcagatcaataggtttgggcctccccggcccccactccaataactcttaagttggctatagttagggactctttttttgtgtggttacctttcagaaagcccagcactggctaggcgcagtggctcacacctgtaatcccagcactttgggaggctgaggtgggtggatcacttgagttcaggagttcgagaccagtctgggtcttcaccccggggcggaggtacggtccnnnnnnnnnnnnnnnnnnnnnnnnnnnnnnnnnnnnnnnnnnnnnnnnnnnnnnnnnnnnnnnnnnnnnnnnnnnnnnnnnnnnnnnnnnnnnnnnnnnncccgggggaagactagtcctcttaaaaaatatgaatatcccctccagaacactggaggggtactaattaataagagacaattaatgagttctattaataatagttaatatggaaatttgttaccgcattcacattacctgaagtcgctttccccgtagcgatataatcaactttaaaagtcaacgtctgatctccatcctgcaacaaaatgttcccggtttgctgtgtctggcgtgatgggccgttgataccatcattcatatacatttgcagggccacgtttgtagcagcatcagatgaggcctgtttattctactacgctgtacatctgagctacgctctccgcatgtgccattttcttggtgaacgctgtgcttcttcgcacgcgcgctcgtaaggcttttcgtcgctctcctgctccgttgctgtttcgtctgtcgctcgttgttctgtctcacgttccctgtgccatcctctccctctctcttttccgccgctctccctttctcgcctttcctccctgtcttcgcctttgtctcggttctcttcctccgccccactagaccgctgcccgtgctcctctcctccgcctcctctgtgctctcttccttctcttcgtctcctcgtcgtgcgctccacctgcggccaccgcgcttcctgttggtccgctatcgttggtcatctgagcgtgtccttcgtcttttcatcttcgtgctgtgttctttgtgtcattctatttccctgatcccttggtctctctcgctctgcgccctccgtgcctctatcttgttcttccgagtctttgcctcgtcgtctgttttcactgttcttctctccccgctggtctcgctcactcacctcttcctcgcgccggggcttttcgctccccgagtctgcactgtcctctttcttgcatgttgggtccattctccctgtttctggtgccttctccgcacgctcttcgccggttccttctctgctggttctcttcccttcgttcgtcgtgtctatgctcctcctctcccctgctacgtttctcctcacgggggcttcccctctctctatcgtcttcctcttactcctttccctgcctcccccgtcacgccgctcctctccgccttgctctgctcgtcctctctcttctagtctctcttcttctcttatcacttctctcgactgctcttctttcttttttctttgtctattctattcttctctctctttccttctctcctcttctctcgcttctcttcctttctctactcttcctttactcctctcctctctgtcctcccttattcgttcttcgctacactctactcatctcccgtcccacttctccgcnn

SEQ ID NO: 2408 - protein, 280 aa, Homo sapiens
MEEDHADHVGPTMDMNKSRPVAIYVSECSARGLFVALLLRCCFVCRSLFCLTFPVPSSPSLFSAALPFSPFLPVFAFVSVLFLRPTRPLPVLLSSASSVLSSFSSSPRRALHLRPPRFLLVRYRWSSERVLRLFIFVLCSLCHSISLIPWSLSLCALRASILFFRVFASSSVFTVLLSPLVSLTHLFLAPGLFAPRVCTVLFLACWVHSPCFWCLLRTLFAGSFSAGSLPFVRRVYAPPLPCYVSPHGGFPSLYRLPLTPFPASPVTPLLSALLCSSSLF

SEQ ID NO: 2409 - DNA, 6888 bp, Homo sapiens
  source (1)..(6888)
  CDS (201)..(415)
  CDS (1077)..(1180)
  CDS (2864)..(3021)
  CDS (3919)..(4045)
  CDS (4851)..(4957)
  CDS (5134)..(5287)
  CDS (6636)..(6688)
aaaaatctccagggcgagggatcagtctcgaggctgccggttcccctggccctcagggatggagccaaggtcccagggcgggttttctttcctaggaagtggttgctgggttctgaggagtttcccccttggcagccatgagccggcagttctggtagtgactgctgggccctgctggacagcggtcgcatgcagctcctatgaggcccctgccgccggtcggcgatgtccggctggagctgtcgcctccgccgccgctgctgccggtgccggttgtgagcgggtctccagtcggctcctctgggcgtctcatggcctctagcagctccctggtgcccgaccggctgcgcctgccgctctgcttcctgggtgtctttgtctgctatttttactatgggatcctgcaggaaaagatgtgagcgaccccgggggcgggccgacagtctctccccagcctgtgacagggatcccgggccttctgcctctggacccgggctttcctcttgtcctcctgcccggctgtcgccctcttagcaccctactacttttgcagctatggctgagcctacccagaattccagaactccaggattattttctggattcttcggacttggttattttcttttcttagctgtttttccccgcttggttctaagggcctgcgttttacaggctgagacttctattcctcaaacaggacccgagtcggcccccttttggtactcccagatgcttgcaaacaacctattcgtcctcggccttggtgccatagccgaaataccgtctcctcctgcctggggtacctgatttcactatctcgttctgcatgtttcctctccgtctttttcgggtattcttttcttaggctttggaatcagtaggctgggatgtctagtttctagatccagtaaaatcagccccttttgcaaatgagcctagtggtccttaacaaactctgcctacatccagagaggcaagataattttaaagttttcagtggctcgggatatattagatgacagtgagtgaaatacactaatttctccctcttttctcatgcatttcatttctagaacaagaggaaagtatggggaaggagccaagcaggagacgttcacctttgccttaactttggtcttcattcaatgtgtgatcaatgctgtgtttgccaagatctgtgagtacccagatagtaatttgttgggtaccccaccaccccaagttccctcagtatgctgggcattaagcattgattcaaccttaaaggctaactcatgatctccaccccattttgtacttacacagcctctctgtgaagtctgtaaaactaatgactttgaagtggagtaaaatattatttccccaatttttatcagcttctgagttagaaatgttcagagaatgggtcttctatattccaaatccccattgaaaatacttaaaacatttttttctttccctttgagtttcttttgtgtgtcagcttcaagcatgctttgagcattctctctttgttccctggggactagcagcagagctgactggtcccttgaactgaatgaggcccccacctccaccctgcatgtggtcttttgttgggcttaggtagaattggaaagatgaataattttcagagatttcccagtgtaacaggacagaaatagcttgtgtcttgtttgacagacaagttcctttcatgtggcttcagctttgcttagtggtccatcctagccccaccaggtttctcttgtttttttttttttttcttttcttttctttttttttttttttttttgtcttctcccagtgatccagttttttgacactgccagggtggatcgtacccggagctggctctatgctgcctgttctatctcctatctgggtgccatggtctccagcaattcagcactacagtttgtcaactacccaactcaggtgaaacctcagggtgggatgatggttggctcagatatcatttgaaaaggactaagagttcttccctcaggtctgtgagttaaaaaaaaaaaaaaaaaaaagataacggtcctgtaagacattgggagtgtatagaaccatagaacttacgtttagtggtggtgggttgggccatgatagggctgctttctgaggctgaggtctctggtgcaggccctgtgcttactcatcttaatcagtgcggtacctagcatagtacctgacacatcacagatgctcagaaattatttgctggatttaatttcaggtccttggtaaatcctgcaagccaatcccaggtaagcaaagaagatggtcttcctcttctgtcgtcactcttcctatagtaagctctctctctgctacaactgtgtccctctcggcttcatcatcccatcatggctgtctccagggactttcccccagctctccctgctgcccatcctgtcatctgtgtcacttcttgtgatgttcataggctggtaatccttaataggagctaaaggctgacctagcctgcttcacttggtcagccatttctgtgttgcatgtgtttatattgtcattagacaacttaattcccattttgatcatcagtttctttatctcaacttcttttccttctccactgttccctacccttgtcctgtcccttcctggacttttcacctttgttctctacctcctccctgtcttatacttaaccctgttgctcaatccttatctaggtgccagcctggcaccctccttttgtcctctctaagccttccttctcagtcattcttttctccctgagtcttttcttggttcctgggagggagggcattggggtcatcaataccttatggatgcctgaattttccactctgttttttccctgtagtcatgctccttggggtgaccctcttgaagaagaagtacccgttggccaagtacctgtgtgtgctgttaattgtggctggagtggcccttttcatgtacaaacccaagaaagttgttgggatagaagaacacacagtcggctatggagagctactcttggtatgagatcctgttggggaaggcacccttttccagcaaacttaaccaaaggatagtctcacctaggcaggtagaaggccagttctgtgtcaagggaggttgtggtgctccttgtccccatatctgctctttgctgcaggcccctgactctattaatgccatagtgggaaacctgaaatatttaactacaactcagctctcattctggagaagagataactctgagggttgtggctgaatcctggtgtgaggtcacagagacctgagagcaaagagggaaggaataatgtctctcactgtggctttccaagaaacctggaagccagagtttaaaataatatgatagtagctggtatgtatgcattaggcactgttccgagtgttttacatgttaattgactaatttttacaacaataatctcatatgtagtattatctccattttacagatgaagaaactaggcacagagaagttaactcgcttgcccatggtcacttggctatttgaagtggtagagtcaggattccaatccaggcagcctaagcacaggatccggtctctggagcactatactccaagctaggaagctaacctgctgggactacctttcccctcccagtatgttgggaagtgagcttcctgctctactctgattacaaaatcactacgtagctcagttagcctgtcagtccagtgcgtgggccggggggcgggggtggggggtagtgagcatggtctctccccaccttccacctgtgaccaaatggcaacgttttgttctgaggactttaaaggcagtggctttccaaggagcctgagagtgagaatcctgtgtcctgggtttggaaagggccctgttggccacttcactgcaggctgcaccctttctttcccagctattatcgctgaccctggatggactgactggtgtttcccaggaccacatgcgggctcattaccaaacaggctccaaccacatgatgctgaacatcaacctttggtcgacattgctgctgggaatgggtgagagccagttctgctgttcttcccatgtatcaccagagggcaggctgccctcatccttttgatccctctagctgttagttgcccagaccaagggcctgaattagttccaagatgcccttttgttcaagcccttgagaaaccttcctggaaaaacctgcaccagcaggatttgtttgctacttgttactggcacaatgaaggagagtcgtgtgtcagttgtcatgggaagacactcagtagtaaaacacagggaggtacctgggaactttccctttcatgagggaaatgagacacacgtagtgctcacaggaaacagagttagctgtacactgaagacagttcaaatgtgaatgatttgctttgaaatcagtgcttcctaacttttcaaatttgggcacatgtagaaagtattttttatacagcacactggggttaatggtggaggctgctgatggctgaaggtgactaatgcgaggggcttccttgagctaaggatgtgtgggtcagcatctctacagcatctgaggatttctgcttgtaatcactttggtagaagtaactcattaactttcaagcctttctcacaaaattctctttagtttctctaatcagagaaaaatatgagaagaatcaatgatgagacgatgcaaacccacaccatacactttcccgcgtcccacctcccttgcagttctttaacaggccatgtgcaggagtgtctgtgtgtgtgtgtgtgtgtgtgtgtgtgcgcacattttgtgtgcacaaaatgcgccgtacatttgttgacatgtcttctcaggaatcctgttcactggggagctctgggagttcttgagctttgctgaaaggtaccctgccatcatctataacatcctgctctttgggctgaccagtgccctgggtcaggtgagtgcttgaaaggggatggcttggcttccctactctggcagctggttccctaagaaagactggcctggctggaagaagagggtggcaagattagccctgaggtctgtttatagactttagaccaatggcagatacccagaagcccaccggacctcacctttatctttctctagagcttcatctttatgacggttgtgtattttggtcccctgacctgctccatcatcactacaactcgaaagttcttcacaattttggcctctgtgatcctcttcgccaatcccatcagccccatgcagtgggtgggcactgtgcttgtgttcctgggtaagtggccacacagagacacagtgacagctgaattttttctcctaaaatttacttgtatatttatgaaatttgtttaaatattttagagaaaacttttctcttttttttgagacggagtttcgctcttgttgcccaggctggagtgagtgcagtggtacgatctcagctcaccaatcgggtgagcttcctcctcctcctgggttcaagcaattctcctgcctcagcatccggagtagctaggattacaggcatgcaccaccatgcccggatgattttgtatttttagtagagatggggtttctccgtgttggtcaggctggtctcgaactcccaacctcaggtgattccccccgcctcagcctcccagagtgctgggattacaggcatgagccaccgcgctcagcccagagaaaacttttttaaaagagaaaagaggctgagtgtggtggctcacgcctgtaattctaacactttgggaggctgaggcaggagtatcgcttgagtttaggagttcgagcccagcctgggcaacatgatgagacccttgtctctgcaaaaaaatacaaaaattagctgagcatggtggcagacgcctgtggtcccagctactcggggctgaggtgggaggatcgtttgagcccaggaggtggaggctgaggtgagctgtgatcacaccactgcactccccacctgggtgacagagtgaaaatctgtatccaaagaaaataaaaggagaaaaggaagctttatttctaatccagccttcctagggtctccctctgttgctcaggctggagtgtagtggcatgatcatagtccactgcaaccttgatctcctggactcaagtgatccacccaccacagcctcccgagtagttgcgattataggcatgtaccacaatacctgaccaatttttttttttttttttgtagcgatggggtcttgctgtgttgcctaggctggccttaaactcctgggctcaaatgatcctcctgcctcagtctcccaaaatgctgggattgcaggtgtgagtcaccacattcagccatagcctagaagttttgactcttaaatttcttttagtcttgctgtattatatatgtatctatatctatctgtatctctatatagatatatttatatagatacagatatctgtaataactagtatcctggtgccattctcttgtctctgaggaagttacataaaaccagtgttctgacatgtattttatttaaagcccccattttggagatacaaggccgactaccccaccccaccacaatcattggtaagtttcatttccccccataaggctaagcccattttcttccttttcataggtcttggtcttgatgccaagtttgggaaaggagctaagaagacatcccactaggaagagagagactacctccacatcaagaatatttaagttattatctcaaacagtgacatctcttgggaaaatggacttaataggaatatgggactgagttccagtcttttttaataaaataaaatcaagcaaaatcacatattctaaaaaatgcacttggattttaacaagacagagtggtggtttttgttcttcatgcc

SEQ ID NO: 2410 - protein, 305 aa, Homo sapiens
MRPLPPVGDVRLELSPPPPLLPVPVVSGSPVGSSGRLMASSSSLVPDRLRLPLCFLGVFVCYFYYGILQEKITRGKYGEGAKQETFTFALTLVFIQCVINAVFAKIFMLLGVTLLKKKYPLAKYLCVLLIVAGVALFMYKPKKVVGIEEHTVGYGELLLLLSLTLDGLTGVSQDHMRAHYQTGSNHMMLNINLWSTLLLGMGILFTGELWEFLSFAERYPAIIYNILLFGLTSALGQSFIFMTVVYFGPLTCSIITTTRKFFTILASVILFANPISPMQWVGTVLVFLGLGLDAKFGKGAKKTSH

SEQ ID NO: 2411 - DNA, 7052 bp, Homo sapiens
  source (1)..(7052)
  CDS (201)..(325)
  CDS (475)..(607)
  CDS (3271)..(3526)
  CDS (3651)..(3730)
  CDS (4293)..(4403)
  CDS (4534)..(4594)
  CDS (4838)..(4940)
  CDS (5078)..(5158)
  CDS (6555)..(6852)
  modified_base (4302): a, t, c, g, unknown or other
ctgcctgggggattgggtcgtgacctgtgtggagccccacactgagctgcagtgggtggggagggtggtttacaggggtgctctgtgcagcccctctgattttcccctgggagtcccaggtccaggggaaggaggacagtggcccaggccacacagctcactgggcggctctcactcccccagggctggctgctggcgggatggacaccctggaggaggtgacttgggccaatgggagcacagcgctacccccacccctggcaccaaacatcagtgtgcctcatcgctgcctgctgctgctctacgaagacattggcacctccaggtgaggcagtcacaacgctgggcaggctcgctgagtgtcagtggcttttcctggtgtaggggggtggtgagggtggggcagattgtgtcttggagagggggtgcatatgtggcctcgccagtgagccagctcctgtgcccatccgccagggtccggtactgggacctcttgctgctcatccccaatgtgctcttcctcatcttcctgctctggaagcttccatctgctcgggcgaagatccgcatcacctccagccccatttttatcaccttctacatcctggtgagttcactgcagttgacagaaaagccaactccaactgggttaaacaaaaagggaattaactgcttctataatgaaaataagcttcaggtatggctggatccaggcagttaaatgatatcgttaggatctgtttctgcatctctgatctctttgggacttatctcagatgagttcccctcatatggtgtcaaagatggccaggagcaactttgagctaacatcctgcctctacaactcaggcaaacagtgcctgtttgctgatagtgccagtgtagacctgggatttcctctgactggcccacctaggatcccatcctcatccctgagccaagcactgtggctagcaaggaaaggggcactgtgaagctgggagggcagcatcagctcagctggaccatatggactgagggagcccacaacagaattggggagctggtactagaggggaggggaatggatgctgggtggggaaaatgcccactgcatcctccatccattcgtcccccatctgtccattctgtgaaacctctttggagaagacatcttacttgctgggagagcctgcattgtcaccacttggtggtcctggcacgtgttgcctggggagaggtgtcagggctgtggttgagaaggcagctccaaatgtgggctctcctggtataggctccaggtgtgggctgtcccagtataggtgccaggtgtgggcttcaggtgtgggctgtccaggtgtgggcttctggtgtgggctctccaggtgtaggcttccggtgcgggctgtcctggtgtgggcttcgggtgtgggctgtccagctgccttccttcagggcgcccttcccctgtctgcagggcctgcctgactggagtcctcccttctctgtggcccttagataccaccacatgagagctgagtggctccctggtcccctccttgtggtctagcccagaacttcccagtcagaggagtgggctgtgggcaggcagagagacagacaaggggctggggaagcctggaggttgtagtggcctgatgtccctcacacctacaagatggtggtagacaggactgggaactgaggcctgctttctttgcttctctcccactgcttctctcaccatttattcatttgtgtatttattcaacagatattaaacacctactgtatgctaggcagatgtccttttgtggggtaagggggagtgcaggcagggagaaagagccagggctaaatgtccaggaacatataacagggcccagcccatcaacttttggggactttgtcctaaagagttcaggaggcagtgttaagagtggactcaggaagtccagctctgaaccccagccatgctgctgtgtgacctggggccagtggcttggtctctctgtgccccagtgcccttctgcataacagatgttgatctgctttagctatggtgttcatgtgagcacctatgaagtcgtctgcatagctgcagcccagtgggagcctggcatacagtaggcgtgtggtagtttgttgcttttactgcctgccctgctgacacaatttctcatggcacaaaagacagagtatatatggatctgggcatgtgtcagaagacccaactgagactcacagaagccagtttttgactgagaaactgggcagttcctgggcctcaggcacagcaggatttgggggcacagcagtgctgctggggcaccatctccatctcccactcagcctgggatctccccgatggccctgctctctcgccatctgcccttgtggcagcagggtggtgtccatggtgccaggcttgcatgctgtccgtctgcctttcccagcagccccacctgacatcctgggtctctctcacaaggctcccttggggcctatgcccttccctgaactagccctgaggccaggggaatggcacacaccactggccagtgctgcgtcccaggcccatccctgaagccaggagcggtggactcagcctcacctggaaccaccgaagtgggggtgagaagggagaggaaggggatggatataccaggccgataagcaccacagatgctgagcaggcactttgtgaaacctgctgggctggtggcttccctagaggtctctgcacctcttctcggtgaccttttgcctggtcccgcatgcctcagaattaaaaccatgaatacggtaataacagcaaatgtatacttggcccttcctgggtgccaggcaggcttctgctgcatctgttaatccatttgacccaacaatcaaacacagtaggttttgtttctgcccccattttatagatgagaaagctaaggtacagagccaggaagcagcagcgtgctgcttgtgatgtgaacctggcccatctggctccaccatgcgcactcctgctcaccagcccaaggctgttggtgctagccaggaagctggggccccgagagggagggccaggctggaagtcacctgcagttgagggtctgcaactctgtgagccttgcttcctggagtgatccccacctccctgtgtcccaccctgactttgcgccttcctcctttccgacctcaggaatcaaaggctcctgtagatatgggggtgggcttgctgcccctgccgatgcagaggctcttgttccctgactgccacaccactcccttgcccaccaggtgtttgtggtggcgctggtgggcattgcccgggccgtggtatccatgacggtgagcacctcgaacgctgcaactgttgctgataaggtgcggctgggccctctgagggaggccagggaggcctggcctggggtgggctggggatgctggtccaggctgacgctgtgcccactctgcgtgcagatcctgtgggagatcacccgcttcttcctgctggccatcgagctgagtgtgatcatcctgggcctggcctttggtgtgtgtaccgctgggctcttgggccctggcgatgctctcccctgcccctccctggctgtgggctgactctggagtggtcacctgggctggctcctgcctgctgaccagcatgtttcttccaggccacctggagagtaagtccagcatcaagcgggtgctggccatcaccacagtgctgtccctggcctactctgtcacccaggtaagagggtgagtgtgggcaggggacgctaggagtcagggcaccaggcacccactgcttctgggtctgggtcaggtttccagtctttatcaccttcagagttctcaaaactttgcacctgagaaatcacatggggtgcttgttaccgaggcacattctggggtcccctggagatttggatccagtgggccagggcgccaggatgggaggctcaggacttgccgttttaataaggagttcaggtagggatggtgcaggtccgcagaccccctgagaagcatgcatgtagaggacccttttttagattgggggcaggaaatctccttgtccttggctgcggcttcttcatgtgactcagcccaagactgggccggctctggatgcttcaatcagttgggcaggtcatggccagggggcagtctggggcaggtgagttgtgggtctggccaagaggctgaacttggtgtggtggagagcttagggggctttgcatcaggaaaagcccctgggagagagaagccttgagatcctctcccttcctcccttcctgctgcccctgcaggggaccctgnagatcctgtaccctgatgcccatctctcagctgaggactttaatatctatggccatgggggccgccagttctggctggtcagctcctgcttcttcttcctggtgaggttcaggctggggcagctggggtggctggggccttagggccaggtagggattggattcctgggtttctggctgtgggtctgggctggcgcccccagcaccttctcagccctgcctgtctctgtaggtctactctctggtggtcatccttcccaagaccccgctgaaggagcgcatctccctgccttgtgagcagctggccggcggctctgggacaggcggggatgggagggagtctaccgggccactgtagagctggtagctgggagctggagctgtagagttccaggctgggagctggagagccctgggtgagagggaggcctagaggggccccgggggacacaccaggcttgagggtagtaggtgctggaggcagagcctggcctgtccagggtgggacctcacgacccaccctgtccggcccccagctcggaggagcttctacgtgtatgcgggcatcctggcactgctcaacctactgcaggggctggggagtgtgctgctgtgcttcgacatcatcgaggggctctggtgcgtgggggccgcagggtgtctgcctcgtgggggcatgggaagtgggcggcagggtgtccacccgctgggggcatggggaggtgtggagtcagcatggggctaggaggccccgcgctgacccgccttctccgcagctgtgtagatgccacaaccttcctgtacttcagcttcttcgctccgctcatctacgtggctttcctccggggcttcttcgggtgagtctgtggccgccggcgcccccgcgtggctgccggcggaactgcgccttcttccagcatgggtgtgaggattgaagctgagaggctgtgtatgcatacagtgcgcatgcgcacgcacatacatacatgcacttgggcacacacatacagatacacatgcacatgcacacagatatacgcacacccacccacatgtgcatggacacgtgcacatgcacacacggatgcacaagcatgcacacatgcacatgcacacacaaacacgcacatacggatacacacgggcatatgcacacaaacatgcacgtgcacacccacatgcatgcatacacacatgaacacgtgctcaacatatacatacatgtagatatatgcacatatccacatatacatacatatatatgcacattgtatgtacagtacacacagacatactctccccacgagagagagagtgactatgcacggtgttctacattgctggtttttatttaataatatattaactcattcattcgcaagcattcattgagcacctactgtgtgccagacactgctagagccagaagatgcgaggcccacagcggatgcaaatcctgtcctcacaaagcttgtaccctgttgggggaagacttaagtggggagcaggtttggggtgggaagtcagttggattctctgggggtgagtacactgctgtgcacatgtgcatctgcagaagcgtctgtgagatgggatgctgaagacatgggattgggggtcccactccagaccttaatgtggtcggaatgtgggtgttttgtcccccctttctcacctgccaggtcttgtggggaggggatcagcctcccacctgggtgaagctgggagagggccagactggtccatggccccagcttggatctttgcacacaatttctcccctgagcctcaggctcctttttgtaaattgggtgtagtgtgtcccccttggagagttgccctgagggccgagggacgaggtcagagtggagtgggtggtaacatgagcagcaggggtcacaggagtgggggcggaggccacagccaatgtctcctgagtgcttgggcaggcactgttgaagcctcatgatttatgtccattcttcctccacacggtgtccacacacccatttcaccatgaggaagcaggcacagatgccccccgcctgagctcacacagccagggggaggagggctgggttccaaaacaagtctagatgggctctggggtccagctcacaggcccactcagagtgggtgtcaggcgactgttggtcaattccttccttatctggtggccccatcagcctggagaggaaggctcttcctgaatcactcagtgaggcttccatgcccctcttttccttttatcagctcggagcccaagatcctcttctcctacaaatgccaagtggacgagacagaggagccagatgtacacctaccccagccctacgctgtggcccggcgggagggcctggaggctgcaggggctgctggggcctcagctgccagctactcgagcacgcatctcgactctgccggcggggtggcctacctggatgacatcgctttcatttcctgccatactgttatcattaacagcacagacatcgaacgctggatggccattaatttctgttgggctatttctcatggcctatttgtgtaaatgcctatgatgatgccaacatgtccatagttcccattgggatgatgatcatgtcttttggtcgttcttttgggcagtatcctttagtgtgcctgttcccaccattagtcttgtagctcaacttccttaggttcctaattccctttttcatttttgctcttactttgggacctcttctccttatcacttacactctaatt

SEQ ID NO: 2412 - protein, 415 aa, Homo sapiens
  MOD_RES (202): Variable amino acid
MDTLEEVTWANGSTALPPPLAPNISVPHRCLLLLYEDIGTSRVRYWDLLLLIPNVLFLIFLLWKLPSARAKIRITSSPIFITFYILVFVVALVGIARAVVSMTVSTSNAATVADKVRLGPLREAREAWPGVGWGCWSRLTLCPLCVQILWEITRFFLLAIELSVIILGLAFGHLESKSSIKRVLAITTVLSLAYSVTQGTLXILYPDAHLSAEDFNIYGHGGRQFWLVSSCFFFLVYSLVVILPKTPLKERISLPSRRSFYVYAGILALLNLLQGLGSVLLCFDIIEGLCCVDATTFLYFSFFAPLIYVAFLRGFFGSEPKILFSYKCQVDETEEPDVHLPQPYAVARREGLEAAGAAGASAASYSSTHLDSAGGVAYLDDIAFISCHTVIINSTDIERWMAINFCWAISHGLFV

SEQ ID NO: 2413 - DNA, 1375 bp, Homo sapiens
  source (1)..(1375)
  CDS (201)..(1175)
  modified_base (98): a, t, c, g, unknown or other
  modified_base (102)..(201): a, t, c, g, unknown or other
  modified_base (331): a, t, c, g, unknown or other
  modified_base (340): a, t, c, g, unknown or other
  modified_base (353): a, t, c, g, unknown or other
  modified_base (862): a, t, c, g, unknown or other
  modified_base (947): a, t, c, g, unknown or other
  modified_base (1042): a, t, c, g, unknown or other
  modified_base (1102): a, t, c, g, unknown or other
agaaagggagcccacatgagaagaacaaagtcagtgttagagcaggtggaggtctgggttctgagctgaggtgtcttgactccactgaggctcagttngggnnnnnnnnnnnnnnnnnnnnnnnnnnnnnnnnnnnnnnnnnnnnnnnnnnnnnnnnnnnnnnnnnnnnnnnnnnnnnnnnnnnnnnnnnnnnnnnnnnnntggttctgtttgtcgcgcgtgtgctgtccttctggtgtgccgcgtgtggtgctcgtgcgctttttgtcgccgcgccctgtgtctcccctcgctttctgcgccgcgcggcgggggtgtcgtgctcgcctcnttgtcggtngtggtgtggtggngcgcggtggggtcgcgcgcgtggttgccgcggggttgttttcgcgcgtgttggcgcccgtttgcccgcctctttctggggcgcgtggtgtttttgtttttggcccgtgtttgttccttttgccgcggccttgtgtgcgccgggggctccccgcgtttggcccgtgtcttttcggcgtccgcccgggttttcgggctttctctggttggtggccgttgttcccgttgcccctccgggcggtgggggtgggcccggttggggtcgtgctgccgtgctcctggtggccctggggggtgcccgctggggctttggctctttcttggggcccttggctcttggctgcgggtggtggtggttcctgcggttcccgcctttcgcgggtgccccgctttttggctctttcccgcctggttcgtgggggtcctttctcggggtgggtctttttgcggcttgttgcggtcgctgtgttggcgtttttccttccccttgcggctggtttcgctttgccgnttggtgccttggcccgtgttgtggtggtgtggcttcctgtgtttcgttggttttgggggtgccgcgtttgcccgtttggtgttgncggcgttgcgccgtttgcgtggttcccggctctctggtccgttgttttgtggggcgcgtcgcgtccttgggttgttgctcttgccttcctcgttngttcgtcggcgggggctcggtccgggttcgtcttggtttgtggctggctgctgtcgtggnttttcgtctctcccttggtggttgcgggtcgcgcacttttgccttcttacagccctggagggcagaagtctgaaatcaggttccctgcaccaaaatgaaggtgtcagcaaagctgtgctccctctggagactctggggaagaatctgtttcctttcctttactagcttccagaactgcattccttgacttgcggcaaactctgaaattcagtttctcctgcaagtaagaaagttgggctaaatgctcttacagctttaatatctggccttctt

SEQ ID NO: 2414 - protein, 324 aa, Homo sapiens
  MOD_RES (44): Variable amino acid
  MOD_RES (47): Variable amino acid
  MOD_RES (51): Variable amino acid
  MOD_RES (221): Variable amino acid
  MOD_RES (249): Variable amino acid
  MOD_RES (281): Variable amino acid
  MOD_RES (301): Variable amino acid
XVLFVARVLSFWCAACGARALFVAAPCVSPRFLRRAAGVSCSPXCRXWCGXARWGRARGCRGVVFARVGARLPASFWGAWCFCFWPVFVPFAAALCAPGAPRVWPVSFRRPPGFSGFLWLVAVVPVAPPGGGGGPGWGRAAVLLVALGGARWGFGSFLGPLALGCGWWWFLRFPPFAGAPLFGSFPPGSWGSFLGVGLFAACCGRCVGVFPSPCGWFRFAXWCLGPCCGGVASCVSLVLGVPRLPVWCXRRCAVCVVPGSLVRCFVGRVASLGCCSCLPRXFVGGGSVRVRLGLWLAAVVXFRLSLGGCGSRTFAFLQPWRAEV

SEQ ID NO: 2415 - DNA, 21925 bp, Homo sapiens
  source (1)..(21925)
  CDS (201)..(439)
  CDS (2638)..(2859)
  CDS (3676)..(3986)
  CDS (4563)..(4667)
  CDS (5037)..(5280)
  CDS (6110)..(6308)
  CDS (6451)..(6572)
  CDS (7102)..(7897)
  CDS (10179)..(10467)
  CDS (10700)..(10803)
  CDS (11936)..(12435)
  CDS (21464)..(21725)
  modified_base (212)..(311): a, t, c, g, unknown or other
acagattttgagagagcttaaaaaatttataatgtatatatatacatatatatatatacacacatacacatgcacataatgtgtttctcagattaatctagaattaacttcataaatactgactgtgttactctattagaaacactatatgctctattattgaaacaaacatatgtgggttataagacgagcgtgagtaaatgacagttggnnnnnnnnnnnnnnnnnnnnnnnnnnnnnnnnnnnnnnnnnnnnnnnnnnnnnnnnnnnnnnnnnnnnnnnnnnnnnnnnnnnnnnnnnnnnnnnnnnnncccccttccgggcccccgccagctgaggggagccgccgactggagccgccgtccggctccccggccccccaaacaaaggacccgccgggtcctagtgcccgcccgctccgtcaccttcgcgcctccgggtcctagcgcctgctcaccgctcgcagcccaccctgccaacctctgcctctgccagtcgctaatacctgcccccatataggcttgcctttatctttctccttgcctgctgcccctcagctcgcgaccctcctgcacctgcctccagctttccctgtccgcaacagtcctccacgtgtttcccacgcaccccacttctgtgcccccttcctcaccccccttgttccttcgccttttgccccacacctcctgctccttttcggcatttgcctgcagctgcagtgcttttagacccccgccctctccgcgttagttcgtccgtccatccatctatcctccctccctccatccttcggtccatccatccatgcctccaacccactgtcctttcccaggcctcttgccctgcctcttggctctctgctcttactctcaccttctctaggcccctgagtgccttagtgagcgggcctacagccccttcttctgatctttgtcttctgggccccagggagcacctggcctcgtggcctttcggggtgacagcaggcatcacgcccctgaagaagtttgcaagtgagaagaggtggaggaggagactgcacggaggggtctctaatgacacttgttctcctctgagacatccgactcccagtttcgttctatccatcattccccgcacttgcatttaacggacttagagtgggagctgccccttgtctcttgcgtgcctaacccacgacccctcataatctggatattatataagattgtcaacaatcttctcatcctagaaaggagcatatctgttaatgggcatcagagagcagacctaagtgggagcccaggccaccctggggctgccccatgctgggtgggcaaagatggggccattgtcagggtctgggtgcattgagaaccggaaatggagtcagacgggtttggtgactcagaattgattttttttttcccaagggacagggagggggcgtagaggagggaggggggaggagagaggtagggggatggggaaaaagctgctttgcacagctaagatgtttttgtcattaacccagaaactgaggtacaagggcaacccctgcccaaaggccctctaagaaggggagggacttgcatagctgaccaaggagactttgaagatgctcaaggaccaaagacagcagtttctctgctctgtgaccatcctatcagtgcaggacctgagaagctgggtgtaactttgacaatgctatggtaacccaggtggagcaaaattgagttcatgggggtggggacctgggagagtatctatttgggatgccacatagtagcagaaaggacccatcgagaaatctcaagaagagactcagggacttatagaaacattggttaaggacggtttcccctttaaatggggaagcaggcccagaaaagagatgatacttacccacaatcacccaactagttagcagtggaaccctaaactgcaccttgaagtgaagggtcccataagaaaggtggatggattcttcttagtggggccatcttagtccagatgcagcaggtgaaggaagatgggcatttgagaatggacccactgaaaggttccccaagtggtcctagcaccaggagcttgtcacggagtgtgggcttcatactgttgagctgcaggccctgcttggggcttctggaaaggggacaacctctgggttgtcttctgggaagaacagtctctggtaaggagaggctggagactctctaaaactggccctgacccttctgagctgtgtttctcctctaggggctgagctggaggagagtagcaaaaacacgaagaagttggatgccatgaccctcattaaagaaggtgggagtcgacacacattagggctgggacccagggcagacaggaccacgctccacttttccaccacactacagaaggaggtggctgcttgaagcagctgtctggggaccctcattttgataggtccgagtcggccggttgttctggctcctgtgacctgtcgttggagatcataatcataggtgattgcccactcacctgaaagcgtataccctttgggactgcttagatcgaactctggaagctggaagcattcagcatggagcttgttatatcagcggggaggtgaagtgccttctgagtgtggggtgggagtgctctccgatcttccagagaaaccctgggatcttcagccccagtgacatgggcttctgtcattgcagacatgtccatcttcgggcactgccctgcccatgatgacttctacttggttgtgtgtaaccactgcagccaagtggtgaagcctcaagctttccagaagcactgcggtgaggggagccctagggaggagataaagggacaggggaaggtggagcatggaactctgaggacagggtcagttgggaggtctcgtagggtaatggagggtggtgttgaggataggaaggttgtgggggtggcttcagagcattgtggggagtcgggttattgtttgaacaaaattctagcatccagtggaattacgggaggagttaagacattcaggaagctgggtcttgaattttgagtcctaaaggctcagattcaaatgggaaggaggcatgtttacaatctaatttatggaaactcagattctctcatgtgagtctatggacatggttaggttggggaaggaagtggtgataccactcaccttgattattctttccacctcctggtgacagaaagaagacatgggcccctcagcaagctttatggccgggccccacccccacctccagcccctgccagctctcagaaatgccatgtagtgaatgggcagggcccagcttgtagggccccaggttccacgaaaacctcctccagggagaagggccaggggtcccggagccgtggccaccagcctcctgagaagacccagaaggacaacctctggtaaggagaggctggaaactttctaagactggccctgaccctgacccatggatgggctgacatcaatacagacagccctgggtcaaggcatactcctcacagcaggaggcagccgtcctgtctgcagcttccttccatatattccagggaagatggggtctcctcttcccgtgtttcacacccctgctggagcccacccaaattccagggctgggaaagagatggctctgggctagagtccaggccccaggcctcgcctcccctcccctccctcagccaaccccctctctctgtgtgtagccttttcgtgcctgtggtgaatctggagaagatgtccagtctcccgaagcctgatggacatggaatcagggtggccccaccctctgcttttctcagccagccagggggcctcaccaaggactcccctggaaaacctcccatggctcccccttctaaagaacctcctggcagagagaacatcgagatcatccccagtgaggggtccagtcactgggctgaaggcagccctcctgaaaaggagcccagtgggaccaggctgccccctaaaacccaccggaagatggctcgtgagtagttgtggtcttgggggtccagaatgtagagtggggactcctttgggctgctttgtccttgggctggatgaggaggaggtcaggtttatgggcctggccatcacaggttgtagggtataggagccccgtcacctcttgacctgcttgcttcctgggaagcttctctccatcctgtgtctcctgatcaaggctgagggagcccatgcccaggaggtgaagttctttctcactcttttctcacctagatccagggcgccagccagacacatctcacagctggcttctctggcctcccagatgcccatggctgcttttgtttcttgatgtgtgttgccctgctttgggcttgaagtcccaaaaggcgcacctgaaattgggatagggatggttctcacacccagcaaggagatgttgatgcccagaagtttatctggaaggtacagccccaggctgagggctggagtcttctgccttagtaccagttctcaggcccttggcaggaagcggccagatcctcctgtaaactcctggaaatggtcttgaggttcattggaagtgctttccccacagggaaggagtgcgacctcaacaggcagtgtggggtaataaatccagagaccaaaaagatctgtacccgcctgttgacctgcaaggtaacccccttcccactgcacggtgagggaggacagcacagggcttgcccactccttccctgggcaaagagaggaatgtcgatgttactgaaggtccagcttaagggagggcagttaggcccacccaagggaaggggagatgggtatgcccctcctgggcagaaggtgggaacagtgggaaggagggagtttccagattcccccatcccaaaggagggttttggccccatgggggaatgaaacaaagacacatgaacacagctgcaaatatgcccacctctctccctgccccccaacttgcccgggccaaagcaccctgccgtccctcaccccttctcagttcatacctactccccagctctccactctgctgtattctagatccactcagtacaccagcgccgggaagtccagggccgggccaaggactttgacgtgctggtggcagagctgaaggccaactcccgcaaaggggagtctcccaaggagaagagcccagggcgcaaggagcaagttctcgagcgcccctcccaggagctcccctcctcagtccaggttgtagcagcggtggctgctcccagcagcaccttctctgttcgtgccaagcagacctacccatactgtgcactgcccaggtacgtctagaatccaacccctacctcacctgggggtacttggcccctaagccatcaggggcccctggaaacaggctcagggagtgtcctggaagaggcactccctcagccctgagtgtgggggtattcctggggctcctgacagtggtgtggaagcaggagactcccctgtttccaaccaggcataccacagcaccccagcctctcggcagtgtgccagatccaacactcaggatatgaacattttcccagctgcctccaacagaccgaaacttgtcactggggagctgaaagggtcacactcctgggcaaggcagccctatgtgtattcactcactggccccttcgcgtgcagaggctatgccggaccccagggagagcctgacttgctgaaggagacacacatgcatctctgcctgtcacacaaggggcagacacgaaacacaggctcagctcacagacaggctcacaggaatatgtgatgcaagaagggggttgagcgagttgactgggctgaccagagctgggtacagttttaactgtgaagattttctggaggaggcggatctgcagcagattatcccctgaggaggaaggggctgggaggtgaaggggctggggagagaatcccttgggagcagtctctctgtctcttactctgtgagctgtgtcgttccctcctgtccttcccttccctctgtcctcttctgattgccctgcagggtgtctgccctggtgccctgctctttgagctcggcaggttcaaggatgcccctactctgaccccacaacagtcacattcccctggcatcccttttggcccttccaggtcccgggcctcctccgagagtgaattggatgatgaaggcccctgtggtggtgatggggacccaggcctgttccccttccccatgccccggggtgggacccaggcctccagcgaagagagtgaggaggaggggacatctgacgacctccacccaccccctgactgccattatgcaacccggcccccacggccacaggcggtaaggacctggaataggggcctatggagggggtggcccagcactcctggccaacaacatggggaggaggccagatcctgtgtgcagatgctgtctgtgcaccccagaccctgccaaccatgcaccttccttctgcctttagttctgcacctttgggagccggctggtgagcccaggatgctatgtgtttagccgccggctggaccggttctgctcagcactcagctccatgctggaacggcacctcagcacacacatgtggaagtaagtctctcggacccagaatggaagttctagaatggaaattcctaggttccagacatacttgggcttcagaagccctgatctttcctgtatacccataggtgtgccttggctatttgccagcaggaccccagatagggagtagcatgaaaaggaggtgggaaaacttggcagcctagagtttggctaaggcagggcatggaagggtggtctgggggtgaatctagactttcatccatcacttccagtaccttttgggtaactagggataggggatgcccaaaccaagatttaaaatgaagttcctagtgggctgcctcctagttagtaggtactagctaattcctctccacaggcacccctgtgtcttcttcctaaccctcagttccagcatctcccagcagatggcagcaactctggggctctgctgaccatttctaggtggggcagagagactggagtgtgtcttgtgttgggggaagctgtcttgtttcttggcagtcacagtggggctttctttttgctgcaggaagatcccaccggcagctgaacctccagctcaccttgtcaactccccgttatctgctcccctgagcccatcctctacaggcacctgcccccgccttccaggtccaaccctgagacctgcctgcccagcctccatgccccccaccaaggacaaccttgtccccagctaccctgcaggctcccccagcgtggcggctgcctgtagccaggcagagtgcatgggcgggagccaggctatcacctcaccactgcctgccaacacgccatccccgtccttcagcaagctgccgccttccaaggccagcaagtcatccaaaggcaaggacggggtggaggtggaggccccttctcgaaagcggaagttatcccctggccctaccactcttaaacggacctgcatcctggagcccactggaaaagggaaaccctctggctgtaggggcctctcggccaaaactaaaacagccctgagcatggggcttaatgggacaatggggccaagagtgaagcgggcagggcccctggactgtcgtggctcccctcatcagctccccacaccagtcaaggcttctcagctggagaaccggggagcagctggacacccagccaaggccctgccaaccaactgcctctctgaggaggaggtggccaagaagcggaaaaacctggccacttattgccggccagtgaaggccaagcactgtcaggctggtgcccctgctgatgtggcctgctctgtgcgccgcaagaagccaggcccggccctggcctttgaggagaagtgctctacactgaaggtaccagccaggctccctgaagattgatgagggtggggcacacagggggtacctgatacagagaagatgctacattggtgtttgtgcagggaaagggaggaaggggaagttgagagagttcctggactgttttctttaggaagaggtaggtcagttcttagcaaagtgactccagctttttgcctggtgaaccttcccctatccctaaccctttcccttgggctgaggagatgcggcacccctccacccctgcttttgctataatcaaagggctacttctttctgaattggctgtgaccctcattccaggtactggagctacctctgttccctgaaggaaagggagtttgagtccctgggtcacagcctaacatgccgagcagcaaggtgggtgggctggtctcactggtttttcctctgggcatcagggccttgaagggcaggcacacaaccccatgtccacttatgcacatgtgcccacctccaggtgtgcaggtgacaggcaagttctccagggtttccagtaaagcctgcagccagttttatttgcctcttctggtgggagccctggtgtagtgtgctatgtgctctccatatgatctctgccaggagggacttactggaggtgggacgggggtgctctcctgggttagatgtgggcctaatcataaaccctgtgtgttctccagcttcactacccaggctgcccctggtgagctggcattcatcttcccccttgctcagttttactcaccaggccagcagaaggaaatcaagctttagcctctgtagtgcacacagttcactgggtaggacagctggtaggcccccaccctgaccctttctctcgcctcttgtcttcctgcagtcaaaagcccattaacgagaaagtgcctgcccactgcaacggagccgccagcacctcctcccctccagatccgggccccaggctgctgccgctttttataactttatattatttttttttaagaaaaaaagctctttaaaatacctcaagactgtctccctgttctgttgctgctatgaaaatataaaaacagaaacatagaaaaggaaggaaaaaaaataacaaaatgagtgtccttactgtccccagccctaccctgggaggctgagatgataggcagccagactccagctcccatagcttgcctgcaaaagtctcttatgctcattattattattattgtcatcttgtcattttcaatagtgtgaaaaatgtttgtgtcactggggtagtctttccagacaggatgatgaggcgtgtggctctgaatgagtaaggcttcctgagtcttgacaccagagacgactatggtcccattgggaagagaaactcgagagggggagctgcacttctggctctttctaggatccttgccccgagggtctgggaattggcttgtgacccttttctggtccttcagcaaccctaggcatccatccctccctgaattattgcctgcttttcttcagctgttcctgcagcctcattttctcagccacttagggagcttgagctgggttggtcattgctgttgggatattcctgttttctattggacagccttccttccctgcctgtgggtttgcctttaaggaaggggtagaacctttcccagggaggcctccttgggttgaaccaccccttttttggaggcaggaagggaaaaggcatcatcacttgcagaactggtggtgtgggaggccacaggagtgtgggaggccttggtccttcaggatcacctggctcctcagggctgagcagctgctgaggaggcggcagggctgggagtgccctagtttttccatttatctcgctggggaccactcccgtgcagatgcgagaggagacttgcatttccctcctttggtccaccaggttcaaggcactatattttggcgatgtcctttcctattctccttgctcttaggcatggaggaagcttgttccctgaacaagacaaaatgaggtgacaggagacagtgcacagccagggaaatccagtactactagaaatcggctccaaacacttgtttcacagtcttggttcagcgtaccaagtgtgtgatttggggtttcactgaaatcgtttgccacaaaagtaatttccacaggctgcttgggatttaggcccttgtagacagacacacagatacaaatgaaggtgggctgggaactgttcggtccccttctgcctccgggctctcgcgggagcgggcctctccggggcactcgcgtttcccccccagcccccagagggcgctgtgggccactccgccgcactgccggcggcgtccccggggaggagcctctcctgcagccgccaccgcctccgcgatcgcaaacccggaagacgtgttcgggcagctggagtgtacgggcccgcgggccacggccatgcagcccctggaggtaggtctggttcccgctccagctggggagccgagactgacccgctggctgcggagaggcagtgggatcttggcgcacctggtagctttgggcttcaccatctttctgacagcgctgtcccggccaggaaccagtgagtgtgcggggcggggttgcggaagggggcggagtggagatgctggaggggcagcgcttgggagccccgggagacttggaggagggaccccagcagtaaaggggagacagaaacagtggagggattttgagggcctggtggggcggggccccagggatcctggaataatggggttttgggtgctgtgggggaagggcagacgattgaacagaccgaactacttcctcagaaacaggtcccctgatggaggatagaagtgaaggaggccgggcgcggtgggtcatgcctgaaatcccagcactttgggaggccgacgcgggtggatcacttgaggtcaggagttcgagaccagcctggccaacatggtgaaaccccgtctctactaagaatacaaaaattagccaggcgtgatggcgcgcgcctgtagttccagctacttgggaggctgagggaggagaatcgcttgaacccgggaggtggaggctgcagtgagccgagattgcaccactgcactccaccctgtgcgacagagcgagactccgtatcaaaaaaaaaacaaaaaacaacaaccaaaaaaaacaaaaaacaaaaaaggggcagaggactgggctgccagctgagaggtgctgaacggggaacccgggccaaactgttgtatgtgtgtggataaggaggccctcttggttgctcaccctggggctccttggctgctccactttgtccttagttcctgtgcccgattaggattggggatggtacttttctcctgtggctagattctttgggttccacctagctacaggggcaggaacaatggtaccaagccctcagcctgttctctttgattcttaggtcttttctcctggcaccctgtattcatggccttggcggtgagtttaggcttctatctgatttgtttgggtattcctcacctcattctcccagggaagcacccagctttcagaaagctcagcctttctaaggctaagacaggtggaggaaacatctagggctcatctttccctgcagcctatgggattgggaaacctggagggctgggccataggcagttgtcagatggttgaaaagggcgggagggcatggaagataatttctttctccattggggccggaaaggagaaggggggagaggtgttatccggtcatctcccgacttgtccccaaagttcaggaagaagtttaacatttgctactccactggtcaagaaatgggagtcattgtagaggttgggatggggagatgtcaacctgaatgaggagacgtgcactcaagtgctgattcccaaatgttcccagaaatgttgagctgtgaggctggtggtcctggttgaacttatttaacccttaccctttgtcctctttgttaggatgtatgagagcacctcctttttctcaggcctccaagccagacatgaggcttactggctctctcctatgttcacagttctgcctctgcatggctgaagccatcctactcttctcacctgaacactccctgttcttcttctgctcccgaaaagcacggatccggctccactgggcagggcagaccctagccatcctctgtgcagctctgggcctgggcttcatcatctccagcaggacccgcagtgagctgcctcatctggtgtcctggcacagctgggtgggagccctgacactgctggccactgctgtccaggcactgtgtgggctctgcctcctttgtccccgggcagccagggtctcaagggtggctcgcctcaagctctaccatctgacatgtggactggtggtctacctgatggctacagtaacggtgcttctgggcatgtactcagtatggttccaggcccagatcaaaggtgcggcctggtacctgtgcctggcactgcccgtctatccagccctggtgatcatgcaccagatttccagatcctacttgccgaggaagaaaatggaaatgtgagttcctgcgaacgctgaatctaggtgggacgcttgccttgaacatcatggttcctttggtgatctataagggatctatttaagaagtggtcaggttttcgcacttcttggctggtccagggactgcagaaaccaaagctgctattgttgaggaataattcagtgggtcaaaatggggagatgtactgggtatgagtggaaggtgatggagagcctgatcctgaagcctctacttgatgagagacagagttttgggtggtgatagtgatgtgctggtggtcatttcttgcttgtgtgcctgatgaaaaactgggttcctgtaagttatgaatggcatccagggatatttgggttacttttaagaaagcagtgtgatgtagtggagagagcccatgggtcttatttatgggatatggtcctcttaggctctgttgtacaaccttaggtacattccatatcttaagaccactgtttcttcatctgtgaaatgtttctaaacaatctctaagtcccttccttctctaatatacagcgtctgtcaggtcgatgtctcagaacactctcccagctgtggaccacgtggaccacttagcagactcagggggtagttctttactctccctttactaccctggagggacagctctgcccttgaggcccttcagaaatttgtgctgatttggtccctgtgccagggcacagggggtcaggcactgtggaaagaagggactcaggtgagggtcttctggactctaagacggtaaaggcactaaagtcactttaaagcttttggagaagcaggagggcattggcttaaccaagccgaaggctgctggctgggctgcctagcccagctaagatcttccttcagcccacctcaggatccgggcttgagggctgcagggcctgcgtgcgctccctcccccgaaatcacttctcagggcaaaggagccccaggcatctcatgctttgcccttcttagggctcaggttcttgccttagcacatagcttctgggagcttttttgaagcatttcataagggccaaggaagtggggcagggcttttctgatccaaagaaaacaaagtttctctggttacccctcttcccttgttatctaagctttcctcagttgtcatctcttcccagctctttggtccaagagggggctgagtttggtgccagctggcaaatgagggctggactctcttccctccagagaccaccccgctccttgctgcagctgaaagtagttccccaggctgccctcggtggtgaggactggatgctagactgctgagctgtggtctgggctcagttgagaagataggatctccctagatcatggcaaggcctgacaacagctgagccaggaaagtgctgctgaggcaagtcgacatagctcacagggaactctgggaagcctgggatgtaggcgctggagctccagttcccaggagcaggggcaggtgttcctagatgttagtgttgtggatgtccttggtcttctgaagattcaggtcctcctctccgggtagcttagaagtaaggaggttggtttgattcaatagtatggggacagaatggggacagcaagggcagaagtgtcctctccacgtaactcattatgcccctcctgggggagattgcatctccaggacaagcatctaaaggaggcccctgctgtgcagaggggtattgttcctgtctctttcattgtcctccctcctctcaaactctccagtgtggtgtgaactcagaagaaacggttactggggctgcatggagaatttcacctgcggtgattttgatccagggactgcatctcctctttcctcatcacagccagtgctgagaggctccttctacctgccgcagggtaggagggccaggcaaagttcaccagcttgctctaagagcaagcaggcaatgccgtaaagcctgagcctgcctgaggtgctgcctcctcccaggtggtgcgggggctggtgggcgggcgggcaggcgtgctgacagccggcagtttgcgtgggctgtgccatctgatgtctattcccagccctgggaggaagggggagtcatttatattctgcaggaggaaggggccccagctgtcgcctttctgaccagcaggcctggagggcaggggcacagagcagagaggagggcactggtggtctcctgcttagcctggtctgactgcagtgtagggaataggtcaccaggaggagcccttcatcctggcaggccggattgtggagggacttccctccccctcttttccatttctccctccatcaccacctgccctcacatcctggggcagcagctggacagccattagacctcagtgccagggcactcttcctccagctgggatctcagtggctcccagctgcatgggctcctgcttgtgtgttccctcctccgccatcctctgttccccgcacctcccttattctgctcatgtctggggtattcacttggctcctcagcaaggaagcaaacgccttggaggagaagcacatggttgcccttttgtccttgctccctggctagggaaagctgctagtggtcagcctgttttgcctttttttttaaaaaaaaaaagccagggcagggtgcttagattttaaaaatttgcgtgtcatttgcacaaattttcatatcaagctaagtcctgattccaaatttgattatattccaaatttgattatattccaaatttgattatattcagattcaaccttgaggacattagaaatatagatggcttctgtatccaaatctgaatggaaatgagattacccttctgggttcagatacccctcccaagcccccgtcttttctgtaaccacccctcctctgagccccatcatggctggggttggtatggaatgggagcagctctgtatctggggaagtcctccagcctcaccttcttggctcttaagtggtaggctgttaccacttgccagcctgggcctcctctctccccaccctttcacaaggcaggctgcccttccgcactcactggcccatcccttctttctcatcgtcccacccttccacccccgtgcatggctgctgtaggtctggtttttttggtttttgttttttttaagacggagtctcactctgccgccaggctggagtgcagtggcagaatcttggctcactgcaacctctgcctcccgggttcaagcgattctcctgcctcagcctcccgagtagctgggactacaggcacgtgccaccatatccagctaatttttgtatttttagtagagatggggtttcaccatgttggccaggatctcttgacctcgtgatctgcccgcctcggcctcccaaagtgctgtgattacaggcgtgagccaccgtgcctagccaggtcttgttttgaaaacctcactgtgggagattcaggcatcctccctaagccagctggccgctgtgctaaagcctgttcagagttaataataatcattagctgaatggtgctggggcctttcagcttcagatctctaagcacttgcaggctgagtcagtcagccctcatcttccccctccttcctgggctgcagagtgtaacagaatgggaaggcactgtgggaaggaagtcaggaatcttgctgctagccacgccttgcagtgacttctcgtctgggagtgggcactgagtcctctcagtaaactaataagacttgcacctgacaaaggtcaagatatgtagggaacacagtgtatgctaggctgagacctatggtggtggcaggggtggctgttgagcctgaacttccagtactcctgcccttccttctgtttacctggcttggcctacagggggcacccctggtcttgatgcctcaagcccagcatttctgggtcccctctgcaagctcagagagcagggaggcttctggtagtgctcttgatgctcctgtgtctggttggcacaaagatcctgtgtaacatgaaatgaaaggtgcatcagcttgggggctgggaaacctgcagtatgggtttactccgtccctatcactggtgtggctgtgggcaaaccacttattgcctgacctacctcacagggatgttgtgagggtttgatgagagaatgaatgttaataggaattggaaaattcaaagcattaaacacatgtaaacaggtggtattattatgttcttgtccttctctttcactgagccaggctttgggctttatgcttcttaggcaataaacagttatggataatgacaggggatctaagtctcagagagttgttctggccatcataagaaaacatggacacatttcttccttccagatgcaaggtcagctcttaccaactcctgccagaaatgccaccacggccatgactagtgaagtttgccgtaagtgctgcctacctggtgttcccaaatcacagggcagactgcagatctcggagtcagtacaattcctccctaggtccagcctgaagttcctggagctggtcttcgtagggagctgcaggtcacaagtctatctaaatctctcctaattctgcccttctgagggaaaagtggagcagacaagctaggaagggaggagcaactggagcaaacagcatcgccacagaccctctgtttaccgaagccacagaatgagcaacacctgcctcaggcattggagatgcagagcagggacccctggcttcccagggtccacagcctggtttccctttccccatttcaggctcgtggaataggatcagtcccctcctcctccaagtgctttattggcattcacatacacacacacacacacacgcacacacacacactgaaagcagttctgtttaagttttaaattggggaagaatactttccattccatttgtctgagagcagcagcagtctgcctggagtggatgcaaagaagcaggaacagcaaaacagcagtgcagaggcttgaatattcgttttttatcttaattgctttttctgtcctgggatccaggaatgaaacactagtcaggcattgtgtgcagagcctcagcagttctcaccagcactgcacaaagacgacaagctgaaaggcagaactgccctggagggtggtttgaagtagcccgtctccagcatggcgctgggcttaaccccttcatgtaggcagaaattacctccagtgaggggaccttccccctacccacccactcaggagactcagctagtcaccagatgcatcacagaataacaatctcagtttataatcctgctattgctaggatttcccagatgagtttttaacctctgttggaagcagattaaggaacgacttcaggctattcagtggcatctgaggagccaactctgtctcactgagtatacatgagtggccccctagcacccctatctttaaagcagatacccagttatctcatggtgctttctaaggatgctcagttctgctcaggccccccaaaagcaaactatgaccaagtgagggagcagtgggaggtaagggaaatgcagcacaaagtacaatccaactccagtacttgccaacctgtatgtgtgcgcacatgcacgcatacaccagccttggaggcaatgactcctgcctaatgtatgccagtgccaaagggcatccagaagtcccactgcagggctccacgtcctggctcactgcaggttggttctctcaggccatggttccaaccagggagagtaaacaagctgactagattggaggcgtcagggcaggtctaagtgtcttcaccattttgcattttccacctaagagtgtagaagcctgatgaaggggcttgactggcagctgctttagccttcctctctcaagccccaggagaggaagcattcagcacaggctgactgtgactagaccagaaaagccaaccgtcccactgcaggggcctgagccttttctgctatgtgggtggagaaagtgaagcttccccactggtttcctgggagatacaagataagtggtgcaagaagtgcatgcagaaagggaaggagttgagagactggggggaagagaggccaggttaaccaatgcactgaactcttacctattctcaaagaaaactgtcatattagcctcctccctccccgcaagtgctacctaagaggagccagggtaagtgctgcaaggcatggcagacaaaattgcacatcttggccagaatctaaggaacttcttgtggtttgggggaggtggtgaggatgtgggtggtgggtgggtggggggtgttgaagagatgcagccatggacttccttgggcttggcacaggccaaaacagaagagagaactccaaactccaagtagtcctcatcagacttgctctccttatcagcttcatcctgtcagccaaattgtcagccatagaaaaactgctttgcagatgaaaaactatataaatgcagagtatgggagtgctctgacatcaacagctgtcatttcactgactgccaaggttgacttgtctgatgtggctggttgtgcagtagctccacccctcgtcaccttggttgttcctcctgaagtgaaaaacaactttccaaatagaggagggctgcccttcggtcaagactttaggtaagtattcaaattcgcattcttttaatttttttcctggtatcatttcctctccctctttggaatctgccacgacagcccccttctagaatcaccaagagaggagccaaagaatcagcatggttagagttttagagtccagtccaatttctggtaggctgaatctgtaccaaaacgtagggactgcatttttctgttccacgcaatgcctaggacacactaaactgtcaaggaagattaacctgcccattaggtgaatatacttttagcctaagatggctaccatttacaacatgaaaatactgataataaaattctgtgaaagtgagctgctgcccaccattttttaaaacccaatccaagcattttttccatggtatggtcagtaggcttgatccagacttttaagagaactcggcagggaggcaaccctctgccctagggatccaggaagacttcattatctacaagcctcagcgagcgccaagtcatgggatttctaaactctaaagcttcagtgacatttgagaatcttaggggtcagcaaagtatggtctgttggtcaaaccagcccactgcctggttttatgtggcctgtgagctaatagtagtttatatatatatatatatatatatataacattttttttttttgagatggagtcttgctctgttgcccaggctggagtgcagtggcgctatcttggctaactgcaagctccacctcccgggttcaccccattctcctgcctcagcctcctgcgtagctgggactacaggcgcccaccaccacacccggctaattttttgtatttttagtggagacggggtttcaccgtgttagccaagatggtctcgatctcctgaccttgtgatccacctgtctcggcctcccaaagtgctgggattacaggcgtgagccaccgcgcccggcctagtttatatattttttaatgcttggaaaaactcaaaaggcatgttaaaatatgaaattcaaatttcaatgtccataagtcaaatcttttttggaccacagccacagtcattcatttttgtcctgtctgtggctacactcaagctatagcagcacagctgagttgtaacagagactgtgtggtctgcagagcctaaaatatttactatctggctcgttagggaaaatgtttgctgaccccggtccatcttaatgcctagatgtgtatttcacccatgtccgtacaatagcacttaaagattttcttcctagataggacacacccttctgaggtacagtgaaccccacccacaggctgaaaaaataaaccagtcagattgtgccagaacagagactcaagccaggtttaatgatcattgtctagttttcagagcccagaggctccaagatttgccagcctaggtgtacacaagtgggaggaatggggtcttggacacgggaggcctgcttgctttgtcagcagagctacgaggaagtacagaggtaagaacacacagaaaactggatccatctgctttgctctccccagctggggtgtaccctctcctggcccctttcttgggccccataaatacaaaataataataataataataattacacagattgtagagccctgtcatcctctgtctccagggacacctgcttcctgggagacatgtctggtttatgggtgtggggtagggtaagaggaggtggtgatctctcggccttttcttatacccacacctggcagttttcaacacagggttctagtgcgcttacatatgctgattattcaattctccaattaaaaagctacctttgggttctatcacctgaaaccacgggaagaaacaaatcaaatctcttggtagggcagccaggtacatctaccaggtgtctcaaactcaaggccaaactagtggatatagtcaggagacttaagagccacagggccttttctcattccctaaactgggtaggaattatgaagaaaacggccctcccagtcctcaggagctccatcacgatgccccagaaggcctgcttcatttaacgctcactttaaagatcttcagagccctagatggtgccaagcggggagactgcagcatggagatgagattttcccagatttcctgatgagtctgaggagggagtcctagttcctatagctccagtaacaaaattctcaggagtctctggaataaatcaagacaacttttctctcctgaggacagttaacaggaagagcagctcacagctacttagccccttgccagtttccttctgagtccttcaatgacctagttctatcttaattgctcatatattgctcatatatatagtcttcacgggaggtttctgaggagtccaaagaaccaggtagctccttaccacctcttctcccaaggccttcaacccatggttcttctaactccagcctgggcagaaaagtgattcagtgccatggagatgtgggtgaagcttcagggagttcagaaatgaaaatacaggagtgtgtatttgaagagcctggcatggtcactgtctctcctaaagaggaatacaattgtgtgcatgaagttgtgcacattggtggagaccattctgagagtatcattaatggggactacagattcactgtcctggtggaagtcaaggtgctggtgtgcatgcatacctataagcatgcatacctatgagcatgcaggtacttgagggaaatgctgcacctctctctcaacaaaactaggttactaataaaggatggacagcagtcttgagttcccaggaccagacaaggggaagatgttgagtccccttccccaatcataataggaagcttaatagtcaggccctccaagcccctcacccacaggtaaatgacacctcttagaatgta

SEQ ID NO: 2416 - protein, 1130 aa, Homo sapiens
  MOD_RES (4)..(37): Variable amino acid
MTVXXXXXXXXXXXXXXXXXXXXXXXXXXXXXXXXXXPPSGPPPAEGSRRLEPPSGSPAPQTKDPPGPSARPLRHLRASGETLGSSAPVTWASVIADMSIFGHCPAHDDFYLVVCNHCSQVVKPQAFQKHCGEGSPREEIKGQGKVEHGTLRTGQPPLSVCSLFVPVVNLEKMSSLPKPDGHGIRVAPPSAFLSQPGGLTKDSPGKPPMAPPSKEPPGRENIEIIPSEGSSHWAEGSPPEKEPSGTRLPPKTHRKMARKECDLNRQCGVINPETKKICTRLLTCKVTPFPLHVHQRREVQGRAKDFDVLVAELKANSRKGESPKEKSPGRKEQVLERPSQELPSSVQVVAAVAAPSSTFSVRAKQTYPYCALPRSRASSESELDDEGPCGGDGDPGLFPFPMPRGGTQASSEESEEEGTSDDLHPPPDCHYATRPPRPQAFCTFGSRLVSPGCYVFSRRLDRFCSALSSMLERHLSTHMWKKIPPAAEPPAHLVNSPLSAPLSPSSTGTCPRLPGPTLRPACPASMPPTKDNLVPSYPAGSPSVAAACSQAECMGGSQAITSPLPANTPSPSFSKLPPSKASKSSKGKDGVEVEAPSRKRKLSPGPTTLKRTCILEPTGKGKPSGCRGLSAKTKTALSMGLNGTMGPRVKRAGPLDCRGSPHQLPTPVKASQLENRGAAGHPAKALPTNCLSEEEVAKKRKNLATYCRPVKAKHCQAGAPADVACSVRRKKPGPALAFEEKCSTLKRALWATPPHCRRRPRGGASPAAATASAIANPEDVFGQLECTGPRATAMQPLEVGLVPAPAGEPRLTRWLRRGSGILAHLVALGFTIFLTALSRPGTKTGPLMEDRSEGGRARWVMPEIPALWEADAGGSLEFCLCMAEAILLFSPEHSLFFFCSRKARIRLHWAGQTLAILCAALGLGFIISSRTRSELPHLVSWHSWVGALTLLATAVQALCGLCLLCPRAARVSRVARLKLYHLTCGLVVYLMATVTVLLGMYSVWFQAQIKGAAWYLCLALPVYPALVIMHQISRSYLPRKKMEILGRKVIQCHGDVGEASGSSEMKIQECVFEEPGMVTVSPKEEYNCVHEVVHIGGDHSESIINGDYRFTVLVEVKVLVCMHTYKHAYL

SEQ ID NO: 2417 - DNA, 9577 bp, Homo sapiens
  source (1)..(9577)
  CDS (201)..(425)
  CDS (462)..(828)
  CDS (879)..(1082)
  CDS (1282)..(1552)
  CDS (1589)..(1799)
  CDS (4456)..(4581)
  CDS (4787)..(5123)
  CDS (6216)..(6334)
  CDS (7958)..(8265)
  CDS (9323)..(9377)
aagggggacctgtgggggccttgaatatggggagaagggatatgggatggccgagctgccttgcccagaggcaggggaggggcagcctgtgccctgggccctccgaaggtccacttgaggtttgacgggaggctggggccagcggccaggccgtgtcctgttaaaggctcaggcgggagcaatgtgcccgttttgggaggatggggggcaaggatggtggggtgatgcctgcgatgtcccccgggggagaccttggccttgtgtccgacatcttgtcatcacagacagagcccaagcgtgttacctcacggggggctgtcttaactattttccagtgtgcatgccaggcagctctgagacgggaaactgctcgtgtgtgcgcggtctgtggacgcagccccgctcccctctgtgcttccgcccgtgtgagacgtgctcctgtgtggccgtgacctgtgaagaccctgcgtgacccgtggggcgtgaggctcggggagggcagggctggggctctggccgggggcgtcatcctgagactggccagcgtcgggctcctagacccgagtttccttgtctgcgtggtgggggtaacctgtctgcatctgtgtcacgtgatggccgccgggattcaacgtgtgagtcactccacacgatgcctgatgcgtgcgatgttccccaagctcgtagctgtcatcgccgtgaccgtgaggctccttcagcagagtggaaggcctcaccccggacggagcgtggaggccaggagggaggatggctggccggtccgggacggcgtcgctctgcccctccggccgattctcagtcccattggtcagcggctgggccgtgacggagaggcctgcgctgctgttgagggccaggtcgtgggttgaagtgcggggcccgggctcgagcgtcggaagcctgcgggggtcgtgggttgaagcgcggggccccggctcgagcgtgggaagcctgcgggggtcgtgggttgaagcgcggggcccgggctcgagcgtgggaagcttgcctgtttgtcgtgtgggaccggccgcggagatgccggctgttcacttggaacgaaggtgcctgccctgtgtgtgccgggtagtttgggggattgtcttcctgttcgtggcttccggcgtgttcccagcatcctgagggttgaggcttggaggacaggaatgatcttcggcttgagaaaccactgtgggcaggttttaccagggaaccccttaagctgtgaaagagctgcagtgcaagcttctagtttccacgcagaccgcgccagagaacccgccgggccgcctcgggacggcagcagaggacccgccgggacgcctcagcaccgacacgcgcccagccatgaggccgcctttagcacggagcgtcgagcggaaacggcggtgcccggaacgcggatgccctttgcagggctggagctcagctctgccttccgacaacacttggctgacagctctgggagtctcaaaacggtgcctttgtggaggggagggccctggacatcctcagaggaggaagcgcgtcctgggtagggtgggcggcacctgttcaacacgcctaacagatgcaaggtcgaaggaggaggggcctgcagatctgagcttgtcgccgaggaactctctggaaatggctcccgctggcccctgcgtgcgacccctacgctcaccagcccgtgtgccgagctttctctgttgatttcggagtgggttctggttcctgcctccctagtgggctctgagtggcagggccctgccgaccgctggcctcagcagcgggtgatggagtgtgggccctgcaggaggaggctctgtccttgatggctcctgggtgagggggtgtgagggaggcggccagcacaaggcgggtgggccctgagaagcccctctgtttcccctttagcctgagaaagctgtacccacagagctggaggagggagtggctcaggatgctgcttagcaaataggttggtctggagtctgggaaatggagggttagactttttgttttctgaagctgggatgggtcgtgcttttaattcgtccaggagaacatggggctgaagagctctctgctcttgtggcccctgatgggagtgctctgaggtctggcaggccacagagctgctgggacggcctcagccccaaacctgcgcctgtcgcttcccggggccaggccagaggtttcccagtgagagctttggggtcgacatttccaggaggagaaggcacttctgaaatagcgtgcccttggtgagcttgtgtggcttttctttctctgtaacctgctctgagttgtcccattgagtgttctggggatgtgggcatctggagcctgtggagaggacgggactgggggtgcgtgggggagacgcccctgccaaggacaggggagaccccctcagtcccacctgggagagtctgtgcgcggggctgtggttgattggctggcaagtttgaatgcggatcaatgtgccacttgtttctaagtcagcagggcccctgcccccacacactgagtggctggattctgggagccttttcctgtggagagtggagctggagtgtggggcgcagggccatggccctgttccagcgtcggggagctagtgtgcaggtgctttctcctgttagcagtgggcctgtgctgtgctccctgtggggttaggcggccccggtgggagcttcagtcttgaaaggggctcatagccctggggtgcaggctgctgtgcgtggggggcatcacacgcaggtccccaggatgatgtgtggtggaggacggggcgacgggagctctccacagagcttcatgtcccttctgttgtctaaaccacagaccccgtgccaggtgaggggctggggtgggtgaggctaaggtacctgccccgaggcctcggggcacttggcggcccctccacccccacaggagacatcggcttgagtggagaggccagcctctgagaaggcttctctctggccaccagctgcccagagctcccagcccagggccagcagcttgtgctggccccagacaggggatgctgggcggcctctcgcagggggagtggtggttttcagacagtggctgcctcgctttggggatgaggatgttttccagacgtgctctggaactgacattaggctctgctgcctacccagcttgaacaaaattaggtctttcatttttttgggttgctgggaatggctttgtggatgcataggagagcatggttgctccaggaagtccggcggggagtgggttgaacaatcggagtctcccatccctgaatcatctcagtgggggcggacgggcagctcctgggggtgtggcaggggctgggctccaggctgcccagcctgcagggagcctccttctagattcttcctctgtatctgtggcgtggaggcatctgctgcctctgtctgcccccgcctcatcctccaggtcttctctagttttgttcctccccatggagcccttacccgtgacgtaagctgaacacctgagaactttcgagcttgcttttctgtttaggtttggaaaaaacatgagaagggtgagtgggagcaaaaggccagtttctgcctggctccctgtcctgggaggaggtggggagaagcctcgggcagggatgagaggttgggatgtctgccctgaggggctgtgggcgggaggccggaggcgcctggttaatgtgtttctgcccctgtgtgcgggtgcagggttctaagctgggactcagggtgcagagggcacgtgtgtgggactttaaagtttgtcatggaggctgagccctggggaagggcagcagcactcggccggctgggcttccttctcctggagtagggtggtcagggaggcagggatatcggggagcgccaccccaggacggagcaggaggcagcctggagtcccctttgtagaccagataaggccaggcagggcctgatgtccgtattctattatttatttattttaagtgtgggggtctcgctctgtggcccaggctgagtgcagtggtgtgattgtagctcactgcagcccagaactcctgggcctgagcgatcctcctgccttgacctcctgagtagctgggagatgacccccttcttacccgttcttccagaataggtcaaattcacatgacatgtgcacacacacacacacacacacacacacacacagaaaagacacccacggaaaccctgaaatatataaaatgatgtccagccagtatgatttgccccctctgcgctgccccatctccgtaccgggtcagccatggcccatctcctggagccgttctctgcatgcgtgccacggtacagcatgtgtgtgtctgtgtgtgttcactcacttcttttcacatgtgtggagtcactccgtgtcctgccttgtgcgtgtggccccctctccctgcatgtccccctctaggctccgtcgggcgctcacgacttctctgaccggtttgcagtgatggaccttgaagcaggtgctaggactttgccgctgcaaatggtgctgcgtggggctccatgcacatcttcacgcaaggtgcaggtcggcaggatgaattcctagaagctgcctggtggctgtaaaaatgttctcatcccaaaggaccaaatatgcagagaagtttaacactcacttttcctgtcattgaaaagttacatttttgtggaaacccgtccaggctggagacagaaggtgtgtgcagggagaggaggctctggggcaccactctaggctgcctgctgctcaggtggttgatgtgggggcagatgccctgttccttggggtaggtgccacctcctccctgctccctggggtaggtgcattttcctccctgctgcctggggtaggtgccgcctcctccctgctccctggggtagatgcagcctcctccctgctgcctggggtaggtgccacctcctccctgctgcctggggtaggtgcagcctcctccctgctgcctggggtaggtgctgcctcctccctgctgcctggggtagatgcagcctcctccctgctccctggggtagatgcagcctcctccctgctccctggggtaggtgcagcctcctccctgctgccccggggtaggtgcagcctcttccctgctccctggggtgggtgcagcctcttccctgctccctggggtgggtgcagcctcctccctgctccctggggtagatgcagcctcctccctgctgcctggggtaggtgcagcctcctccctgctgcctggggtaggtgctgcctcctccctgctgcctggggtagatgcagcctcctccctgctccctggggtaggtgcagcctcctccctgctccctggggtaggtgcagcctcctccctgctgccccggggtaggtgctgcctcctccctgctgccccggggtaggtgcagcctcttccctgctccctggggtgggtgcagcctcttccctgctccctggggtaggtgcagcctcctccctgctccctggggtaggtgcagcctcctgcctgctgcccggggtaggtacagcctcctcctccctgctgcccggggtaggtgcagcctcctcctccctgctgcctggggtaggtgatatttctgccctcctacctgattaggctctggggccactcttggggatgggggaggagggccggcccccggggtgctggccatggtcctgaccaggagctgcagttgcggctcctcgtgggccagaggatccccttgtgtgattcttgtttggcatccgcccaggccatagagtcaggggcttggctcacctctgggcagctatggggaaggggctggtgtttgggaggtgcccgaggaatgatcggtggggggtggctgctggggcaaggtacacgaccggcttctctcctttacaattagcactgagccagcttatctgagaccatcccttcccacgggtgccatttaattagccaagagctgagttaagatcacgtgaagaaagttgggggggccttggcctgagcggcgggtggacagggctgcgtctgtcagggtgagggggtctggcggcccctgccgccctcgtttcttaaataaacgtttggtcgtggcttattttcttctgactgcaaagtaagcacatccaccgcaggagactgggaaagcgtggaaaacagggaaggacgtttgctcttcctggtttctttccaggtgtctgcgcccgcctgtgcgtttctaaacagaataggattcaggcggtcccgtcccgctgtggtgttaacggcatactgtccacacttctcatgggcaagatgagtctcgcgtgccaggtagttggcttgtctctgacctggggctgccgcagcacctgtccagccacctgtggacatggatgacggcagagtccctgtgttgtgtggtgtccctgcgtggatgtcgacaccacagctgtcctggggacgtgtccacatgaggcttggggaatccacatgtgtcccatccagggctgtcctgcaggccccgggtctgcctgaatgtgattaggtgatgaggccaccctggccaggaaggctggtgaggggagagggaggacgcaggctggcccaggaggggcttgtgttggaacgagattctttctgtggggtgagccctccgtcgccggaggtgtgcaagtggaggccgagagagagcactcactaggacgtttgtagggggccagggactggagctgtgagccgtggaccagctgagggcactggcctgcttgggagggggttaggcgtggctgtctcagggggctgtgggggggaaggcctgctgggagcctcggtcaggagtgccactgttggggtgccctcagcacctgaatgggtttcgggtggggctgacaggcagcttgagcccatgaagggagtgtgggatgtctcaggaggagcccccttgttgagggtggggggagcccctctccaccccagctcccctgggacctcatgaagcctttgctccccaaagctgctaagggcttgggtaaggccagggagggacctgcagggtcaggagcccaggccaggccaagcaggggtccccaaaggtgctggggatgggggtgtgcatgacagggaagctccggggctcgggtttggggaggagtaggctgggctgggatggggacactggccagggccagagccaagcttcagccacagaagaaggggcgattctacagctcacaaggtccccgggtgccgtctgcttcctgtagtgtaaacgcacctgtccacattccagccttcctaccgagacaacagcaccatggactggaggagtctggaggggacaaggtgtggtgagtgttaactctccccacccaaagctatcctattcagagagaaactgaggcacaggtgggtggacaccctaggcacagagccactgatgggcaggcaggttacctgtgtgcgcttgctgtcccagaccttgacaacacggtttattttgttttttaaaaatagaggttaaattatcctaacatgcagatagcattttaaagcgagtaattcagaggcgtttagagtggagaatttagtgatggtctgccgccaccagccctatttgaaaacttgtcaccccatgtggacactcttgccctctgccatcgtgtgccccaccctgtccctggcagttgccggtctcctgcctgtctctgtgacgtgcctgttattttattttatttaatttatttatttttgaggcagggtctcttttcgcccaggctggagtgcagtgtctcaatcacagctcactgcagcctggacctcctggactcgagccatcctccagcctccgtctcccgagtcgctgggactgcaggtgccccaccacatctggctaacttaaatcatttgtagagatggggtctcattgtgttacccaggctggtctcgaactcctaggcccaagctgtcctcctgcctcggcctcgccaagctctgggagtacaggcgtggccgccgggcctggcctgtttgcttcggatgtttcgtgtaagtggagttgtcatcgtggtgccgttttgtgcctggctttccttgccgagcctgccctcaggttccttcgtgtttagggtactccttcatcctctccgtgtctgggggccgctgcctcgtccttcctgtggccgcacggacggacctcagtttatctacccacccaccaactggatgttgggttgcgtctgccgtgaggctgctgtggacacgcggtgagtgtctctggacatttcgtcattcctcttgggacgaagcctgcgtcacatgtggccaggtgccctgggtgggccgtgccctcctcatctcagccccccagacccacacaggccccctcccggagccctcgccttgctcttcccgctgtgcggaaggtggtgcagtgacgcctgagtgtgggccccaggcctagctgccagcctgggctctcgagcaggttcaacttggccagggcagggtcttggctgccgcctgcctggatgtggggagacgcctctgtgcaggttctgggctgggcacttggggccactgtctgagcagaggatgtggggtcctgcctccgggagggcgagcagaccgctgctctggggggacagtgctcggtcaggctcagggccctggagagaatacaccagggagacttgggggctgcccggggaagggatggtcgggcagcctttcagagaaagtgacctgagattgaagcctgggggatgagggggcggctctgggacctgcgggtaggagaggattccaggcagcaggaagtgcacgtgcaaaggccctggggcagggacggcgtttgccgagggcaggaggggagcagggtggatgggtcgcgtggggtccaccatgaggcactgcagcggcctcgagggccaggccagggtggggtctatcttcagggcctggggctcgcctatgctggctgccattcccacccagcttctccacatgcttctgggatcaaagtggctggtacaggggcgcttctctgcgggctcagtgggttgggatggggcagtggagagtgggtagccggggcatgccgggaggaagagtaaagtccaggggaccccaggccaggggctgcgagcccagggaggttgcggggtcggggagggcgggccaggacctctgcatggggctgggctgggcactttggccagccctgcttggtgcaccggctgggtctctgtccagcacctgtggtctgggtgggacaggtgactaatggagaacaaatgagccctgcggagcttccgtctccagggaccgtgagcaggcgctgcgaagtcacgaggcagtgcccggggagctgatttaaccacgtgctgagccagcgggtttcctgccagggcctgggagtctgcccacagctgcagctcccagagcccctggggtgcatggcggatgccccctctttctgggccggggcgaaggccctggaaggacctgtggttgctgcagcaatgcagggggctgggggtccctgtgggccttgggcgtctgctgcgggagtggtta

SEQ ID NO: 2418 - protein, 740 aa, Homo sapiens
MGGKDGGVMPAMSPGGDLGLVSDILSSQTEPKRVTSRGAVLTIFQCACQAALRRETARVCAVCGRSPAPLCASARTLRDPWGVRLGEGRAGALAGGVILRLASVGLLDPSFLVCVVGVTCLHLCHVMAAGIQRVSHSTRCLMRAMFPKLVAVIAVTVRLLQQSGRPHPGRSVEARREDGWPVRDGVALPLRPILSPIGRGLKCGARARASEACGGRGLKRGAPARAWEACGGRGLKRGARARAWEACLFVVWDRPRRCRLFTWNEDRAREPAGPPRDGSRGPAGTPQHRHAPSHEAAFSTERRAETAVPGTRMPFAGLELSSAFRQHLADSSGSLKTVPLWRGGPWTSSEEEARPGCKVEGGGACRSELVAEELSGNGSRWPLRATPTLTSPCAELSLLISEWVLVPASLVGSEWQGPADRWPQQRAPSGAHDFSDRFAVMDLEAGARTLPLQMVLRGAPCTSSRKVQVVDVGADALFLGVGATSSLLPGVGAFSSLLPGVGAASSLLPGVDAASSLLPGVGATSSLLPGVGAASSLLPGVGAASSLLPGVDAASSLLPGVDAASSLLPGVGAASSLLPRGVCARLCVSKQNRIQAVPSRCGVNGILSTLLMGKMSLACQAQAVLLPRPRQALGVQAWPPGLACLLRMFRVSGVVIVVPFCAWLSLPSLPSGSFVFRVLLHPLRVWGPLPRPSCGRTDGPQFIYPPTNWMLGCVCREAAVDTRDREQALRSHEAVPGELI

SEQ ID NO: 2419 - DNA, 1192 bp, Homo sapiens
  source (1)..(1192)
  CDS (201)..(992)
tctcctcagcacactgcttaaagtattagccatgcctaatctacatatatccttatacacctccacactcgttgatttttcactaacgcctcttaatttgtcgatatttatgtaggcccccactcattcacctaggtttatttttcatataaacaagccctcgtatatattttatatgtccatccacattatacccacgtatgtacattcaatatatgtatatatacctgtctgtatcttcaagatatgtatatacacccgtgtgtattttttatatatgtatatatgcacgtgtgcataccttacatatgtacatatacgcgtgtgtatatattacatatgtatatatacacgtgtgtacacattacatatgtatatacacacgtgtgtatatattacatcacgcatatacacacctgtgtatatatacatatgtaatatatacacgtgtgtatatattacatgtgtatatatacacgtgtgtatatattacatgtgtatatatacacgtgtgtatatattacatgtgtatatatacacgtgtgtatatattacatgtgtatatatacacgtgtgtatatattacatgtgtatatatacacgtgtgtatatattacatgtgtatatatgcacgtgtgtatatatacatgtgtatatatacacatatgtgtatatattatatatgtatatatacacatatgtgtatatattatatatgtatatatacacatatgtgtatatattatatatgtatatatacgcatgtgtatatattatatatgtatatatatgcatatgtatatatgtgtatatatgtatatatgtgtatatatgtatatacatatatgtgtatatatgtatatatgtgtatatatgtatatgcatatatgggtatatatatgtgtatatatgtatatacatatataatctatatattaatacataggcatataaatatgtatatatgtatatgtaattttgtatatatgtaattttgtatatatgtatgtgtatatatgtattagaaaattacatatagatattatatataaagttaagagatgtgaagaatacatgtaagaagtcaatgaatatttatttcccaccaaataaataactggaaaaataatttttaaaattactaatctgaacagttttgagtctttatgtgaaaagggccaatgagtactaa

SEQ ID NO: 2420 - protein, 263 aa, Homo sapiens
MYIQYMYIYLSVSSRYVYTPVCIFYICIYARVHTLHMYIYACVYITYVYIHVCTHYICIYTRVYILHHAYTHLCIYTYVIYTRVYILHVYIYTCVYITCVYIHVCIYYMCIYTRVYILHVYIYTCVYITCVYIHVCIYYMCIYARVYIYMCIYTHMCIYYICIYTHMCIYYICIYTHMCIYYICIYTHVYILYMYIYAYVYMCIYVYMCIYVYTYMCIYVYMCIYVYAYMGIYMCIYVYTYIIYILIHRHINMYICICNFVYM

SEQ ID NO: 2421 - DNA, 1225 bp, Homo sapiens
  source (1)..(1225)
  CDS (201)..(1025)
gtgaaaacataagatgtttggttttccattcctcagttacttcacttagaataataatctccaaactcatccaggtcactgcaaatgctgttaattaattccttttcatgactgagtagtattccacatatacatattccatatatattcattccatatatatattccatatatgctcattccatatacatattccatatatgctcattccatatacatattccatatatactcattccatatacgtattccatacgtatgtactccatatacgtattccatacgtatgtactccatatacgtattccatgtatgtattccatacgtatgtattccatgtatgtattccatgtatattttccatatgtatatattccatgtatatattccatatgtatatattccatatatattccttatgtatatattctgtatgtatatactccatgtatatattccgtatatctatattccatatatgtattccgtatgtatatattccatatgtactccatatgtattccatatgttccatatatattccatatattccatataaattccatatattccatatatatcccatatacattccatatattccacatatattccatatacattccatatattccacatatattccgtatattccatatagattccatacatttattccatatatattccatatagattccatatatattcagatatattccatatttatattccatatatggaatatatatgtattccatatatatgtattccgtatatgtatgtattccacatatatattccatatatgtatgtattccacatatatattccatatacgtatattccagatatatactccatatgtatatcccagatatatatattccagatgtatatattccacatatatattccagatgtatatattccatgtgtgtatattccatatatgtatattccatgtgtgtatattccatgtgtattccatatatatattccatgtgtgtattccatatatatagtccatgtgtgtattccctatatatattccctatatatatattccctatatatattccctatgtacattccatatatatattccccatgtacattccatatatattccccatatatattccatatatattccccatatatattccatatatatattccccatatatattccatatatatattccccatatatattccatat

SEQ ID NO: 2422 - protein, 274 aa, Homo sapiens
MLIPYTYSIYTHSIYVFHTYVLHIRIPYVCTPYTYSMYVFHTYVFHVCIPCIFSICIYSMYIFHMYIFHIYSLCIYSVCIYSMYIFRISIFHICIPYVYIPYVLHMYSICSIYIPYIPYKFHIFHIYPIYIPYIPHIFHIHSIYSTYIPYIPYRFHTFIPYIFHIDSIYIQIYSIFIFHIWNIYVFHIYVFRICMYSTYIFHICMYSTYIFHIRIFQIYTPYVYPRYIYSRCIYSTYIFQMYIFHVCIFHICIFHVCIFHVYSIYIFHVCIPYI

SEQ ID NO: 2423 - DNA, 1177 bp, Homo sapiens
  source (1)..(1177)
  CDS (201)..(977)
atatatgtatatacatatgtgtatgtgtatatatgtatatacatatgtgtatgtgtatatatgtatatacatatgtgtatgtgtatatatgtatatacatatgtgtatgtgtatatatgtatatacatatgtgtatgtgtgtatatgtatatacatatgtgtatgtgtgtatatgtatatacatatgtgtatgtgtgtagatgtatatacatatgtgtatgtgtgtagatgtatatacatatattatatgtatgtgtgtagatgtatatacatatattatatgtatgtgtgtagatgtatatacatatattatatgtatgtgtgtagatgtatatacatatattatatgtatgtgtgtagatgtatatacatatattatatgtatgtgtgtagatgtatatacatatattatatgtatgtgtgtagatgtatatacatatattttatgtatgtgtgtagatgtatatacatatattttatgtatgtgtgtagatgtatatacatatattatatgtatgtgtgtagatgtatatacatatattatatgtatgtgtgtagatgtatatacatatattatatgtatgtgtgtagatgtatatacatatattatatgtatgtgtgtagatgtatatacacatattagatgtatgtgtgtagatgtatatacatatattatatgtatgtgtgtagatgtatatacgtatattatatgcatgtatatacgtatattatatgcatgtatatacgtatattatatgcatgtatatacgtatattatatgcatgtatatacgtatattatatgcatgtataatatacgtatatacgtatatatgtatgtatatacgtatatacgtatattatatgtatgtatatatgcatatacctatattatgtatatacgtatatacctatattatgtatatacgtatattatgtgtatatatgaaagattttttttatgcagtcatccactgataaacactgaggttgatttccatatctttgctattgtgaatagtactacaataaacaaatgagttcagttatatttttgatataatgatctcttttcctttcaggtagatacccagtagtgggatctcttgaactaccagtagtggtagttctttgagaaatcttcatgctgttttccatagtgttgtactaatttatat

SEQ ID NO: 2424 - protein, 258 aa, Homo sapiens
MYIHMCMCVDVYTYIICMCVDVYTYIICMCVDVYTYIICMCVDVYTYIICMCVDVYTYIICMCVDVYTYIICMCVDVYTYILCMCVDVYTYILCMCVDVYTYIICMCVDVYTYIICMCVDVYTYIICMCVDVYTYIICMCVDVYTHIRCMCVDVYTYIICMCVDVYTYIICMYIRILYACIYVYYMHVYTYIICMYIRILYACIIYVYTYICMYIRIYVYYMYVYMHIPILCIYVYTYIMYIRILCVYMKDFFYAVIH

SEQ ID NO: 2425 - DNA, 1081 bp, Homo sapiens
  source (1)..(1081)
  CDS (201)..(881)
acattgtattattttccaggaatgttcaagacatcacaaccccttctttacctgattcatttttcatcaacattctagacagagattaagcatcatctttccaagaagtctttctgtgttatttgtttacacatcagctgacatttttcttcctctggccatagtcatatatatatgtgtgtgtgtgtgtgtgtatatatatgtatatatatgtataccatatatatatgtatatatatgtataccatatatatatgtatatatatgtataccatatatatgtgtatatatgtataccatatatatgtgtatatatgtataccatatatatgtgtatatatgtataccatatatatgtgtatatatgtataccatatatatgtgtatatatgtataccatatatatgtgtatatatgtataccatatatatgtgtatatatgtataccatatatatgtgtatatatgtataccatatatatgtgtatatatgtataccatatatatgtgtatatatgtataccatatatatgtgtatatatgtataccatatatatgtgtatatatgtataccatatatatgtatatatgtataccatatatatgtatatatgtataccatatgtatgtatgtatatgtataccatatgtatgtatgtatatgcataccatatgtatgtatgtatatgcataccatatgtatgtatgtatatgtataccatatgtatgtatgtatatgtataccgtatgtatgtatatgtataccatatgtatgtatgtatatgtataccatatatatgtatgtatatgtataccatatatatggtatacatatatatacacacacatgcatacacacacatatatattaaatatatatgaatatatatgtttttcagcatctgtgtcattacattataataggttgtccgtacatctgtgtcccctattaatcagcaagcttcattaggaaagtgattggatcccctgatttctattccttatatctaatacactactggactacaatacagactttaaattgattggttgagtgagggaatggatgaatacccagcatt

SEQ ID NO: 2426 - protein, 226 aa, Homo sapiens
MYIYVYHIYMYIYVYHIYMYIYVYHIYVYICIPYICVYMYTIYMCIYVYHIYVYICIPYICVYMYTIYMCIYVYHIYVYICIPYICVYMYTIYMCIYVYHIYVYICIPYICVYMYTIYMCIYVYHIYVYMYTIYMYICIPYVCMYMYTICMYVYAYHMYVCICIPYVCMYMYTICMYVYVYRMYVYVYHMYVCICIPYICMYMYTIYMVYIYIHTHAYTHIYIKYI

SEQ ID NO: 2427 - DNA, 2330 bp, Homo sapiens
  source (1)..(2330)
  CDS (201)..(428)
  CDS (1141)..(1256)
  CDS (1282)..(1554)
  CDS (1794)..(2130)
cctcattagtgatgtcgtatagagcgtcctcattagcgatgtcatatacaatgtcctcattagcgatgtcatatacagcaacctcattcgctatgtcttgtaaagcatcctcattagcgatgtcatatacaacgtcctcattagcgatgtcgtatacagcgtcctcgttagtgatgtcttgtacggtgtccttataagcaatgtcgtctacagcgtcctcgttagcatgccttgtgggtgtcattagcgatgtcatatacagcatcctcattggtgatgtcttatatggtgtcattagcgatgttgtgtacagcgtcctcgttagcaatgccttgtacagtgtcctcgttagcaatgtcatatacagtgtcctcattagcgatggcttatacactgtcctcattagcgatgttgtgtacagcatccttgttagtgtgcctcgtacggtgtcattagcgatgtcgtatacagcgtcataattagcgatgtcttatacggtgtcatcattagtgatgttgtgtacagcgtcatcgttagcgatgccttgtatggtgtcctcattagcgatgtcgtatacagcgtgctcactagcgatgtctttttttttttatatatactttaagttttagggtacatgtgcacattgtgcaggttagttacatatgtatacatgtgccacgctggtgcgctgcacccactaactcatcatctagcattaggtatatctcccgatgctatccctcccccccccaccccacaagagtccccagagtgtgatattccccttcctgtgtccatgtgatctcattgttcaattcccacctatgagtgagaatatgcggtgtttggttttttgttcttgcgatagttactagcgatgtcttatacggtgtcctcattagcaatgtcgtgtacagcgtccacgttagcgtgccttgtcggtatcattagcaatgtcgtataaagcgccctcattggtgatgtcttgtacggtgccgtcattagcgatgttgtgtacagtgtccttgttagtgacggcttgtatggtgtcctcgttagcgatgtcgtatacagcgtcctcattaccgatgccttgtatggtgtcctcattagcgatgtcgtgtacagcgtcctcgttagcgtgccttgtacggtgtcattagcgatgtcatatacggcaccctcattagcgatgtcgtatacggagtcctcattagcgatgtcgtgtacagcgtccacgatagcgtgccttgtcggtatcattagcaatgtcgtataaagcgccctcattggtgatgtcttgtacggtgccatcattagcgatgttgtgtacagtgtccttgttagcgacggcttgtatggtgtcctcgttagcgatgtcgtatacagcgtcctcattaccgatgccttgtatggtgtcctcattagcgatgtcgtgtacagcgtcctcgttagcgtgccttgtacggtgtcattagcgatgtcatatacggcaccctcattagcgatgtcgtatacggagtcctcattagcaatgtcgtgtacagtgtccacgttagcgtgccttgtcggtgccattagcaatgtcgtataaagcgccctcattggtgatgtcttgtatggtgccgtcattagcgatgttgtgtacagtgtccttgttagcgacggcttgtagagtgtccttgttagcgatgtcatatacaacgtcctcattaccaatgccttgtatggtgtcctcattagcgatgtcgtgtacagcgtcctcgttagtgtgccttgtacggtgtcattagcgatgtcatatatggcatcctcattagcgatgtcgtatacggagtcctcattagcgatgccgtgcacggcatcctcgttagcaatgccgtgggcagcatcctcgttggcgatgccgtgggcggcgtcctccttggcgatgccctgggcggcgtcctcgttggcgatgccctgggcggcgacctcgttggcgatgccctgggcggcgtcctcgctggcgattccgtgggcggcgtcctcgttggcgatgccctgggcggcgtcctcgttggcgatgcccttgtcggcggcctcgttagcgatgccgtggacagcgtcctcgttagtgatatcgtgtgaggcatcctcgttagtgatgttgtgtacggtgtcctcatggggagctagaagaacacagagttaaggtcagtgccctggtagtggagactgtgaatcacccaggggcttgcttggtgtggtgcatggaggtggctgatcacagcatgggccaagctgatgctgggacatcctcccaggtggacctgcactagtgaagctaa

SEQ ID NO: 2428 - protein, 317 aa, Homo sapiens
MSSTASSLACLVGVISDVIYSILIGDVLYGVISDVVYSVLVSNALYSVLVSNVIYSVLISDGLYTVLISDVVYSILRALYGVISDVIYGTLISDVVYGVLISDVVYSVHDSVPCRALIGDVLYGAIISDVVYSVLVSDGLYGVLVSDVVYSVLITDALYGVLISDVVYSVLVSVPCTVSLAMSYTAPSLAMSYTESSLAMSCTVSTDVIYGILISDVVYGVLISDAVHGILVSNAVGSILVGDAVGGVLLGDALGGVLVGDALGGDLVGDALGGVLAGDSVGGVLVGDALGGVLVGDALVGGLVSDAVDSVLVSDIV

SEQ ID NO: 2429 - DNA, 35425 bp, Homo sapiens
  source (1)..(35425)
  CDS (201)..(293)
  CDS (21253)..(21367)
  CDS (21462)..(21603)
  CDS (23918)..(24055)
  CDS (26460)..(26597)
  CDS (26868)..(27016)
  CDS (35125)..(35225)
  modified_base (35270)..(35425): a, t, c, g, unknown or other
cggcttatgctcagggctgctgtcactgcacagccaggctgccctggtgcaactggggagcggcccagcaggtttttcctcccagtctgcctgccgcggggcaccgggctgtcctctccccgcctcatcagggcccagccttcccaagctcgccttctctctgccgggcgcagccggctggtggtggccactgagacaagatgcctagcatcttcgcctatcagagctccgaggtggactggtgtgagagcaacttccagtactcggagctggtggccgagttctacaacacggtgagtgcgtgggtgtgtgaaggagtctcgccagatgccggttcgaatcccggttcctccccatacagccttactggggaatcttgctggagtggttcacctgtctcagccctagttttctcatctgttagccaaagagtgccagctttcattcatttacttgtctttacttgatgccaagctctgtggtaggttttggagacacattggtggccaggaaaagaaccggtctctgccttccctaagctaactctgatgtgactgcaggcatttgcaaccgggagcgatggtgccttcttggagggcacagaggcagctgtggtagggggaggcagagggtgcccctgagctagagggggtgggccaatcaggaaaggcttcctggaagaggtgattgtgtctgtcttgtttgcagctgtacccactgaccaacttgtcccagtgtgcctgggactatcctggtttcagtatttaaaaagtttcacctcttggctgggcgcggtggctcacgtctgtaatcctagcactttggaaggccaaggtgggtggattgcctgagctcaggagttggagatcgccctgggcaacgtggtgaaagcccatctctactaaaataaaaaattagctgggtacggtgtcaggcatctgtagtccaagctactcaggaggctacggcatgagaatcgcttgaacccaggaggcggaggttgcagtgagctgagattgtgccactgcactccagcctgggtgaaaaagcgagactgtctcaaaaaaagaagaaaaaaagtcccacctcctgagaaactcctcagttctggacattctgaggtggtcttctctttccctgttaaaacaccacatgggaagtgctaaaaaatcatggatgtacctagcaccatggctcatgcctgtaaccccagcaatttggaacgcagaggcaggaagatcgcttgagcccaggagttccagaccagcctgggcaacatagcaagaccctgtctctacaaaaagtttttaaaaattagctgggtgtggtggtgtgtgcttgtagttccagctacttgggaggctgaggggggaggatttcttgaacccaagaagtggaggatgcagtgagctgaggtcataccactgcactccagcctgggtgacagagggagaccctgtctcaaaaaaaaaaaaaaaaaaaaaaggccgggcgcggaggctcacgcctgtaatcacagcactttgcgaggccaaggtgagtggatcacctgaggtcaggagttcgagaccagcctggccaacatggtgaaaccccatctctactaaaaatacaaaaattagccaggtttggtggcaggcacctgtaatcccagctgcttgggaggctgaggcaagagaatggcttgaacccaggaggcggaggtttcaatgagccgagatcgcaccattgcactccagcctgagggacaagagcgagacttcgtctcaaaaaaaaaaaaaaaaataggaatgcacaaatgatcacggcatttagccaaagcttaaagccaaagatcagtgcagctatgccatgcccatactgggtgctgggaacacagaggtgtttgcctggagccctgggaatgatgggatccaggcatagtgcttagttcttttgtttgtttgtttgtttgttttgaaacggagtctcgctttgtcacctaggctggaatgtaatggcgcgatctcggctcactgcaacctctgcctcccgcgttcaagccattctgctgcctcagcttcccgagtagttgggataacaggttcccaccaccacgcctggctaatttttgtatttttagtagagacagggtttcaccatgttggccaggctggtcttgaactcccgacctcaggtgatccgcccacctcagcctcccaaagtgctgggattacaggcgtgagccacggcgcccggcctcgtagtgcttagttctatgccctgcacataggccttgctcagtgagcagaagagtgcttgctggctgggtgctatggctcacgcctgtaatcccagcactttgggaggccgaggggggtggatcatgaggtcaagaggtcaagaccatcctggccaacgtggtgaaatgccgtctgtgctaaaaatacaaaaaattagccaggcatggtgccgggcgcctgtagtcccagctactcaggaggctaaggcaggagaatcacttgaacccgggaggcagaggttgcagtgagccaagattgtgtcactgcactccagcctggtgacagagcgagacctcatctcaaaaaaaaaaaaaaagtgcttgctgtgtaccaggcatgaccctaaacattttacgtgaaacacctcctttaatctgcacagtgacatggggagttagatgcaatctatatgatacagacttcatcccattttccaggtgataaaacaggtgttcaaggagtttgaaggctgtgcccagggtcaccctggttattagagccaggatttaaacttggtgagtccaggagacttttctgggaggagagtccgaggctcaggttgctctgaccctgttgcctttcaccccggggcttcccatacctgggaagtgggattatgagactccaggatcctcacggtctcactgattcttgctcttccttagccagagatatggttcccggtcctcagtagtcccacctctaacatgggagggagctgaatgattggtcctacgaggctgagatgatgggtaagggctctagagctcttctctctggaatccccagcagccactgtggtccagtgttctgttttcatcctgcacccagatgagagcccttgcagaaggcactgagaggctgggtatggtggctctcacctttaatcctagtactttggaaggtcgagacaggaggatcacttgaggccagaagttcaagaccagcctaagcaacatagcaagacccagtccctacacaaaatttaaaaactagctgtgggctgggcaccactggcttatgcctgtaatcccagcactttgggaggccgaggcaggtagatcatttgaggtcaggaatttgagaccagcctggacaacatggtgaaaccccatctctactaaaaatacaaaaattagctgggcatggtggcgcatgcctataatccctgctactggggaggctgaggcacgacaatcacttgaatctgggaggtggaggttgcagtgagccgagatcacgccattgcactccagcctgggtgacagagcaagactccatctcaaaagattaaaaattagccgggcgtggtggctcacgcctgtaatcccagcactttgggaggccgaggcgggcagatcacgaggtcaagaaatcgagaccatcctggctaacacggtgaaaccccgtctctgctaaaaatacaaaaaaattagctgggcgtggtggcgggcgcctgtggtcccagctactcgggaggctgaggcaggagaattatgtgaacccggtaggtggaacttgcagtgagctgagatcacgccactgcactccaacctgggtgacagagcaagactccatctcaaaaaaaaaaaaattaaaaattaaaaaattaaaaataaaataaaaataaaaactagctggtaggctaaggcaggaggattgcttgagttcaggagtttgaagctgcagtaacctgttactgcaccaccgtattccggcctgggcaacagagtaatatcctgtctctaaaaaataaaaagcacctagaaagggctgattcaagtgtgtcctgagcctgagtatagctgtgtgttcttatctcaggcaaaattgtcctccactggattctgctgtagcctgtccccagataaaataaattgagccacctgtagctaccgggtaaggctgcagttgtcaaactcctctgatcagaacacctattatgaaagaaattttacatcatcatcatcctgtacctgcctttccagatgtgtatcatacagaaacaaaagttgcacaaaacgagacttacccttccctggtacaaacacacctggatctattctattctattctattctattctattctattctattctattctattctatatcaaaaagcctctctccaaacaggtcaggggatgaggaatagaatcagagttatgtgagaaagggcttccccaagaccttctcctccaaaacgcttctgagtatcccaaacccatagctaataaatcatacagttcaaaagggtggagtgggtggcaaattttttcttttcgtgtttattttattttatttttattttacctgttttagagacacagtctcactctattgcccagcctgggatggagtggtgccatcatagctcactgcagccttgacctcctggacttaagtgatcctcctgccccagccttcaaagtagctggaaccacaagagcatgccaccaaacacagctaatttttaaatttttatacagatgggtgctgggcacagtggctcacacatgtaatcccagcactttggaaggccgaggtgggccaatcacttgcgctcaggagttcaagaccagcctggaaaacacgatgaaaccccatctctatcaaaattacaaaaaaaaaaaaattagccaggcatggtggcatgcatccgtagttccagctacttggaagactgaggcaggagaattgcttgaacctgggaggtggaggttgcagtgagtggagatggtgccactgcactccagcctgtgcgaaagagtgagactctgtctaaaaaaacattgttttgtatagagatggggtcttgctatgctgccaggctgggctcaagtaatccttgtgccttcacttcccaaagtgataggattacagacataagccactgcacccagggccaaccttttctgtacagggctagctagtaaatatttttgactttttttttttttttttttttttttgagatggagtctcagtctgttgcccaggctggagtgcactggtacaatctcgatcttggctcactgcaacctccacctccctggttcaagcaattttcctgtctcagcctcccaagtagctgggactacaggcacctgccaccactcccggctaatttttgtatttttagtagagatggggtttcaccttgttgctcaggctggtcttgaactcctgacctcaggtgatccaccctccttggcctcccaaagtactgggattacagccatgagccaccacgcctggccaatatttttggctttctgggccatccagactctgtctcaactacgcaactatgccactgtagctgaaaaccagccatagataatagataaataaatgggtgtggctgtatgccaataatttttttttttttttgagatggagtctcactctgtcgcccaggctggagtgcagtggtgcaatcttggctcaccacaacctctgcctcccaggttcaagcaattctcctgtctcaacctcccgagtagctgggattatagatgagcaccaccatgcccagctattttttgttatttttagtagagatggggtttcaccatgttggccaggctggtctcgaacccctgacctcgtgatccacccacctcggcctcccaaagtgctgggattacaggcacaagccaccgtgcctggccaattttttttttattgacactgaaatgtgcatttcatataattttcacatgtcacaaaataatcttttaatttttcaatcatttgaaaatgtaaacatgattcttagcttgtgggacacatgatacaaggcagtgggctgaactttgcccacaggccaaagagtgtttatttattttattttattttattttatttttattttattattatttatttatttatttattttgagacggagtctcgctctgccgcccaggctggagtgcagtggcctgatctcggctcactgcaagctccgcctcccgggttcacaccattctcctgcctcagcctcccgagtagctgggactacagacgcccgtcaccacccctggctaattttttgtatttttagtagagacggggtttcaccgtgttagccaggatggtctcgatctcctgactttgtgatccgcctgcctcagcctcccaaagtgctgggattataggtgtgcaccaccatccccagctaatttttgtattttttgcagagacagggtttcaccaggtcatccaggttgctctcaaactcctgacctcaggcgatctgcctgcctcaatctctaaaagtgctggcattataggcatgagccactgcacccagcctgctttcttgctgctctgtttgggagcatgcagagcccagcagctcatggtcagggttacagaaacaggaaacacccaagaactcaccccaggtgtttggagacttcatagaaaaggacatgtaggagttgggttttgaaagatgaataggagtttgccaagtggggaaggatagcaggagagcagggaaagatgtgctcagttctggaagtcaaagaagagctggtcagattgagaaaggagaaagtatgttcctgtagctacaatgtggggagagatgaagacgtaacggttcgcatgcttggttagaatgttggaaacgtatcctgtgttcactgatggactcattcatttattcaatcaaaatgctataaacccaccgctgctggatgatcctgggattccagggaggaggctcggtgtccccaggttgtaagagacccagaattagaaacagatttcttcagccccatggttagcttgaggcggagagaggaagggggtgccagaaacggggtgtcagaggaatggggcataaggtctctgcttgctgaatggggaaagaacatcaacaatgctctggggggcaagtgtggtggcttacacctgtaaccccagcactttaggaggccgaggcaggaggatcacttgagctcaggagtttcagaccagcctgggcaatatagcaagaccccatcactacaaaagattaaaaaaaaaataggccgggcgcagtggctcacgcctgtaatcccaacaccttgggaggccgaggccggcggatcacaaggtcaggagatcgagaccatcctggctaacacggtgaaaccccgtctctactaaaaatataaaaattagccgggcattgtggtgggcgcctgtggtcccagctactcgggaggctgaggcaggagagtggcgggtgaacccaggaggcggagcttgcagtgagccgagatggtgccactgcactccagcctgggctacagagcgagactccgtctttaaaaaaaaaaaaaaaaaaaaaatagctgagcatggtggtgcacacttgtggtcccagctactccggaggctgaggcagaagaatcgcttgagcccaggagttcaaggctgcagtgagctatgatcacaccacttcactccagcctgagggacaaaaccagaccctgcctcaaaataaaacaaaaacaaaaacaacaatgaaaaacaaacaataccatggaaaccaaatctaaaaagaatgagtagatgtcctctaaggctttgaattttgtttgtttgttttagtgacagggtcttgctctgttgccctgcctggagtacagcggtgtgatcatagctcactgcagccttgaactcctgggctccagcagtcctcccgtctcagcccccagagtagctgggattacaggcatgagccaccacgcccagctcaagggtttggaggcaaagggaatagcatatgtaaaggtctttgttgttgttcttgttttgaggcggagtctggctttgtcacccaggctgtagtgcagtggcacgatcttggctcactgcaacctctgcctcccaggttcaagtgattctcctgcctcagcctcccaagtagctgggattatagcacctgccaccatggctggctaattttttgtatttttaatagagacagggtttcactttgttggtcagcctggtcttgaactcctgacctcaagtgatccacccacctcagcctcccaaagtgctgggataacaggcgtgagccactgcacccggccaaggtcttgaggtggaacagcacagcctggcaggaaatagtgagcagcttgaagcggagcccagggggagtctccccagtcgatgggggagagactgaagggtgagagaaaggactggaaaggttttcaggggccaaattgggaatgtcaggctgaggactgtgtgctctgtcctgagagccctggggagccatggggtggcttttgaacagaggagagtcatgatgtggggtcagctggggcaaccggtggcatttggcagatgggcagagagagccaggaagggtcatccaacaggaacagaagtcagcagtgtgggaggggcggctcgagtagggaaggggaagaggtccaggtgtgggctccgtcagtttgctcctgcttgcattggcctggtggcctccaggtgcagccttcttctgggttgatgacaacttaggagagtttccttccttcctccttccttccttccttccttccttccttccttccttccttccttccttcctttctctctctctctttccttccttccttccttcctttccttctctccttctttctctttctttcttctctcttctctctctttctctttctttctttattttattttgttttgagatggagtttcgctcttgttgcccagactaaagtgcaacagtgcaatctctgcctcccgggttcaagaaattctcctgcctcagcctcccaagtagctggaattacaggcacgtgccaccacgcccggttaattttgtatttttttttttttagtagagatggggtttctccatgttggtcaggttggtcttgaactcccgacctcaggtgatctgcccgcctcggcctcccaaagtgctgggattacaggcatgagccacctcgcctggcagagagtttcaaatggtgcaggtggaagtttcaaggtcccccaggtcctggaggcagtgagttatgatcacttcactgcactccagcctgggcaacagagtgagaccctgtgtctaaaaaaaaattaaaaagaggccaagtgcggtggctcatgcctgtaatcccagcactgtgggaggccaaggcagggagatcacttgaggtcagcagttccagaccagcctggccaacatggtgaaaccccatctctacaaaaaatacaaaaatagccaggcgtggtggctcacacctataatcccagctacttaggagggtgaggcaggagaatcgcttgaagctgggaggtggagattgcagtgagctgagatcacaccactgcactccagcctgggtgacacagcgagacttggtctcaaaaaataaaaataaaaagagagaaatgaggagatcagagtcggaagggggtggaggggagatagtctgcagtgctgccatctccaacactctcctcacctcctctcctgagtctccttgaggctggcttctgcagtgggattccagtcccagctctcccctgaatgctgtgtgacccaggaggagacctgcccctctctgagctacacacaatggcaggtctcataagctctaaattacaagtatggatgtgagatccactcatgcctccctcttctgctgtccttcttatcaatatccacagcaaaaacaattaattactggacgcctctggtgtgccaggccctaccaaaagcaagatgggagggcaggaaaatacttctctgtattagttcattttcactctgctaataaagacttacctttatgtctgggcagtttgcaaaagaagaaaaagagactaggcaatttacaaaagaaagaagtttaatggacttacagttccacgtggctggggaggcctcacaatcatggtggaaggcaaggaggagcaagtcacatcttacgtggatggcagcaggcaaagagaaagagcttgtgcagggaaactcccatttttttttctttttttcttttttttttttgagacggagtctcgctgtcacccaggctggagtgcagtggcgtgatctctgctcactgcaggctctgccccctagggttcacaccattctcctgcctcagcctcccaagtagctgggactacaggcacccgccacctcgcccagctaattttttgtatttttagtagagatggggtttcactgtgttagccatgatggtctctatctcctgacttcgtgatctgcctgccttggcctcccaaagtgctgggattacaggtgtgaaccactgcgccctgcctgttttgttttttgtttgtttgttttgagacagagtttcactcttgttgcccaggctggagtgcaatggcgtgatctccgttcaccgaaacctctgcctccctggttcaagctattctcctccctcagcctcctgagtagctgggcttacaggtgtgcaccaccacacctggctaattttttgtattttcagtagagatggggtttctccatgttggtcaggctgttcttgaactcccgacctcaggtgatccacccaccttgttctcccaaagtgctgggattacaggcattagccaccacgcccggctgaaactcctgtttttaaaaccatgagatctcatgagactcattcgctattaggagaacagagcaggacagacccaccccgataattcaatcacacgggaattgtgggagttacaatttaagatgacatttgggtggggacacagccaaatcatatcattctccaaagaagaatcttttgctttcttgttgctctgtttgcaaggagctgagtctggggttgaggttgcagagcccagacactcatggttgtggctacaggagaagaaaacacccgaggagtcagcccaggtgttgggaggcttcatggaaaagggcacccagggttgggttttgaaagatgaataggagtttgccaagtggggtaggagtttggggaaagacagcagaagagaagaagaagatgtgctcgagtcctggaagtcaaataggagctgctacatatttctgctacatattttgtctttcatttacatctttagatcaaaagcatccttttaaatagctgcataatatttcactagaatgtattcagccccacgcacctgggtgacagtgttacagtttctattttatttattcattttttattgcaattacaaatgacttagggatgaatttgtatataaatcttgttgacccagggaaggcagatgccgtaagttggataattacatgcatgaaaccagtgatctagcccatgatactcccaggcaagataggttcctctggacctcctttctcctttgaagaaaacaggtgttggtgacccttccctgcaagcatcctggggctgatggaggggtttgagttgttgggacaacaatttcttctttattcaacaagaattgcaggagcaccaggctctgctccaggctctgaggacacagcagtgatccaagcaccaaaactccctgccggccgggtgcagtggctcatacctgtcatcccagtactttgggaggccgtggtgggcagatgacctgaggtcaggagttcgagaccagcctggccaacatggtgaaaccccgtctctactaaaaataattttaaaaattaaccagatgtggtggcacgtgtctgtagtcccagctacttgggaggctgaggcagaagaatcgcttgaacccagaaggcggaggttgcagtgagctgagattgcgcactgaaccccagcctgggcaacagagtgagactctgtctcaaacaaaacaaaacaaaacaaacaaagaaaaaaatacaagaaactccttgccctggtggggctgatgttctggggatggagaagaagaaaataagccaaagtcaaggctacaagatgccaggcggtgggatgtgccaaggaagaaaaactcatgcattcactctctttttttaaagaatgtatttcggccagatggggtggctcacacctgtaatcccagcactttgggaggctgagacaggtggatcagttgaggccaggagttcaagactagtcttgccaagatggcaaagccccatctctactaaaaatacaaataaataaatagacaagcatggtgatgggctcctgtaatcccagctactcaggtggctgaggcaggagaatcgcttgaacccaagaggcggaggttgcagtgagccaagatcatgccactgcactccagcctgggcgacagagtgagacttggtctcaaaaaaaaaaaaagaaagaaaattttctggaattagctagtgtgatggttgcatgccttatgaatatactgaaacccactgaattgcatagtttaaaagagtgaattttatagtatgtgatttatgtcttgattttaaaaatagggatgttaaaaaaaaaaaaacaacccacagctcttggcacatcctaagcactgaatacattgtagctattcttattacgagtgaatacagcacccagagatgtcaaagtgacattcattaattttattaggtatttattcatttcattgaataattagcaccaactgtaatcctcataaaatcctatgaagtaggtacaattatgctccccattttacagatggggaaatcaaggctcagagagggtatatttctttcctagggccacacagtatgcaaattacaattgcacaaaagttgcagcttcttaaagagcctggtcctagaatctctcccttaaccatggtgctgtgagaccacttaattactggtgattaggaattaattgtgtgcattttggatggcacagcggctcacacctgtaatcccagcactttgggaggctgaggcaggcggataacctgaggtcaggagtttcagaccagcatggccaatatagcgaaaccccgtctctactaaaaatacaaaaattagccaggtgtggtggcacacacctgtagtcccagctactcaggaggctgaggcaggagaattgcttgaacctgggaggcagaggttgcagtgagccgagatcgcgccgctacactccagcctgggtgacagagtgagatatacgcattttaattcatgcaattaagtcttgtgctgtggccggtgcacacttcgtccctccaacattagcaggcacacttggaatgaatgcaggtggctgtcctcaactggagacagaggccaggtgttgctggtgggagggagtttgagctttggcaatgaggacgaagaatgaggagatgttggagatgtattcaacaaacttttctttctttccttttttttttttttttttgagacagaatctctctctgtcacaggggttggagtgcaatggtgcgatctcagctcactgcagcctccacgttcaagcgattctcctgtttcagcctcctgagtagctggcactacaggcatccaccaccacaccggctaattttgtatttttagtaaagacagggtttctccatgtcggccaggctggtcttgaactcctgacctcaagtgatctgcccacctcagccttccaaagtgctgggattacagacatgagccactgcgcctggccccttctgtattatttatgtgtattcttttctactaaaatgtattaggcgcctactgtgtgccagagagtgttctagatacagggtggggagggggcaaaacacacagagctccctggtcccgtggcacttaactctgtaatcctcacagcagcctctggaagtaggagcaggaaaaccaggcacaggaggtcccctgctgtcctgactgtatacaccccgagaaggcagggactttgttttcagacactggtatggtccttgagcacatagtaggtactcaagggatgcttggacaaatgaatgaatgaatgaatgaacgaatgaatgaaggaagggagggaggtgatgtcacctgctggagctgggaccaagaaggtccagctcacttgtgtccagagttcaggactgggctggctttggatgggatcccagacaggtgtctcccccgcctggcagagcctgggtgggatgagaagcagggaacgtgggggctgagccccggaaggcagggagggagaccctggcatccaggcagtttccgatgttatcggaaactccattagtcggggtcccccattagtcagtatctccacccacagtctctgtcctccttctgagcgcttagggacactgttgataactcctggctggactctgctggcccctaagcttggaataacgatacccataacaggcctgttattattattatctccttcaacaataacaacagcagcagccccagctattttttgagctcataccacatcctgggcaatgcacttctgcaatgcctcatcttgtgcatggcccgcatcagcctgcaaggtaccattgatgatgtgtcctgcttttactgatacaagcgaagagaaaccaagaggcattagtcacagggccaggcagcaggggagcaccctcttaatcaccaccacccgtctagtctttccatctttgttttcttttttttttctttttctttttgagttggagagagatgagttaggaataattttatttttatttatttatttattttttttgaaacggagtcttgctctgttgcgcaggctggagtgcagtggcacgatctcagctcactgcaacctccgcctcccgggttcacgccattcttctgcctcagcctcccaagtagctgggactacaggcgcctgccaccacacccagctattttttttttttttttgtatttttagtagagacggtgtttcactgtgttagccaggatggtctcgatctcgtgacctcatgatccgcctgcctgagctttccaaagtgctggaattacaggcatgagccactgtgcctggcctattttttattttttatttattttggggggacagagtctcactatgtcacccaggctggaatgcaatcgtgtgatctcagctcactgcaacctctgcctcccaggttcaagcgattctcctacctcagcctcctgagtagctgggattacaggcatgcgccaccgcacctggctaattttgtatttttagtagagatggggtttctccatgttggccaggctggtctcgaactcccgacttcaggtgatcggcccacctcggcctcccaaagtgctgggattacaggcgtgagctgtaatccatgcccggctaattttttgtactttttttttgttttttttaggacggggtttcaccgtgttagccaggatggtctcgatctcctgacctcatgatctgcccgcctcaccctcacaaagtgctgggattacaggtgtgagccaccgcgcccagcctgaacatgttttaaatggagatttttagaggctgaggtgagtggatctgctttgttcaggagttcgagaccagcctgggcaatatgatgaaaccctgcctctactaaaaatacaaaaattagacatacatggtggtgagtgcctgtaatccctgctactcgggaggctgaggcaggagaattgcttgaacccgggcggtggaggttgcagtgagccaagattgccccactggattccagcctgggtgatagagcaagactctgtctcaaaaagaaaaaaaacacaaaaacaaaactaacaaacaaaaaacaaaacaacaacaaaaaaagttggagagagatgagttatggaaggaatttatacgccaagtttaagagtttagactttatttattgaaggcccagacacgttttaatggatgcttttgaatctgggagactggttgggtcagtatcttcaggcacgcgttgatattcaagggctggtgtttggttggaggcagagggaacattgtgtttgtttgggagtatgtgtgcatcagcacaaatggaggcaactgaactagggccacgggctgagaagaggcgcatggaggcgttggcatggcccctgtcccatctgtccttggaccactgaagagaagcgcttgcagtccagaactgtagtcgtaatctgtttactgacattgtccatttcatatcaatcacttgtttttctttccacacctgtcttagttcagtttgtgttgctataaaggaataactggggctgggtgcagtggctcacgcctgtaatcccagcactttgggaggccaaggtgggtagatcacttgaggtcaggagtttgaaaacagcctggccaacatggtgaaaccccgtctctactaaaaatacaaaagttagccgggtatggtggcacgcgcctgtagtcccagctacttgggaggctgaggcaggagaatcgcttgaacccaggatgcggaggttgcagtgaaccgagattgcaccactgcactccagcctgggtgacagagtgagactccatctcagaaaaaaaaaaaaaaaaaaaaagatggggagggaaagagacttgtttctgagctcatgtgacagtttcatgtttttcttttgtttgtataaattgaagaagtacaagtgcagttttgttacatgtatgtattgtgtggtggtgaagtctgacctcttttttttttttttttgagagggagtctcgctctgtcgcccagactggtgtgcagtggtgcgatctcggctcattgcaacctctgcctcctggattcaagcgattgtcctgtctcagcctctggagtagctgggattataggcatgcaccaccatgctcggctaattttttgtatctttagtagaggcaaggtttcaccatgttggccaggctggtctcgaactcttggtctcatgatccactcacctccacctcccaaagtgctgggattacaggtgcaagccaccgcgcccggcccgatatttgattttctgtttctgagttgtttcacttaagatcatgtcctccggttccatccatgttgccgcaaaggcatttcattctttgtgtgtgtgtgtgagacagggtttcactctgtcacccaggttggagtgaagtggcacaatcacagctcctgcagcctccaactcctgtgctcaagcaatctttcctcctcagcctctcaagtagttaagactacaggcacatgccagtatgtttggctaattttctaaatttattttttatggaggtggggtctcactatgttgcccaggctggttgcgaactcttgtcctcaggcaattctcctgcctcagcctcccaaattgctggaatcacaggcatgaaccatcacacctggcctatttcattcttttttctttttttgagacggagtctcgttctctcacccaggctggagtgcagtgcaacaatctcagctcactgcaacctctgtctcccagattcaagtgattctcctgcctcagcctcccgagtagctggactcacaggcacacaccaccatgcctggctaattcttgtattttttgtagagatggggtttcaccatgttggccaggctggtctcgaattcctgacttcgtgatttgcctgtctcaacctccccaagtgctgagattacaggtgtgagtcaccacacctgggctcattctttttttaatggctaaatagtattccaggccaggtgtggtggctcatgcctgtaatcccagcagtttgggaggccaaggcgggtggattgcttgagtcctggagttagagaccagcctgggccacatggccaaatcccatctgtacaaaaaatacaaaaattaggctggccgtggtggctcaagcctgtaatcccagcactttgggaagccgaggagggtggatcacaggatcaggagatcgagaccatcctgactaacacggtgaaactccgcctctactaaaaatacaaaaaattagccaggtgtggcggcgtgcacctgtagtcccagctgctggggaggctgagtcaggagaatggcatgaacccgggaggcggagcttgcagtgagccgagatcgcgccactgtactccagcctgggcgacggagtgagactctgtctcaaaaaacaaaacaaaacaaaacaaaaattagctggacatggtggtgcatgcttgtagtcccagctacttggagggctgaggtgggaggattacttgaacctgggatgtcgaagctgcagtgacccatgatcgtgtcactgcattccagcctcggcaacagagagagaccctgtctcaataaataaataaataaataaataaatataaataaataaggccgggtgcagtggctcacacctgtaatcccagcactttgggaggccgaggcgggcggatcatggggtcaggagattgagaccacggtgaaaccccgtctctactaaaactacaaaaaaataattagctgggcgtggtggcaggcacctgcagtcccagctactcaggaggctgaggcaggagaatggtgtgaacccaggaggcggagcttgcagtgagctgagatcgcgccactgcactccagcctgggcgacagagcaatactccatctcaaaaataaataaataaataaataaataaataaataaaattccattgtgtatatataccacatcttctttatccaatcattgggttgatttcatatcttcacctgtgtgaacagtgctgcaataaacatatgaacgcaggtatattttagtataatgatttcgtttcctttgggtagatactcagtagcgggattgctggatcaaatggtagtcctaattttagttctttgaaaattctgcatactgttttccgtagaggttgtacccatttacatttccacccatattatataagtatttgtcatatgagagacttgtcgcggctcagacatatcagggagacactttgtggggagtcaaagtctgatgtcagcacgtcggggtcttgagtcatttaattttgggtgcaaatgttcttgtgaccttttttttttttttttgaggtgaagtcttagtctgttgcccaggctggagtgcgatggcgtgatctcggctcactaccacctctgcctcctgagtttaagcaattctcccacctcagcctcccaagtagctgggattacaggcacccaccactacacccagctatttttttgtattttagtagagatgggatttcaccatgttgccctggctggtttcaaactcctgacctcaagtgatctgcctgcctcagcctcccaaagtgctaggattacaggtgtgatccactgcacctggccaatttttgtattgttttacattattgtgaaatatatattcacatattatatatatatatatattcacaatatatatttacatactgttttgtagagtttcactatgttttttgggctggccttgaacgcctgacctcaggtgatctacctgcctcagcctcccaaagtgctgggattacaggcgtgagccaccatgcccggccatcacctgaagtttcattcactcatgtgtctgatgactgtatagggaagaattgaaccactggccctcctctggcatctctctccatctcagtgtggtctctacacatggtttctccagcgtggtggcttcaagggtagccagtcttcttgtgtggtggcctaggatctggacgtcttgtcctatgagatagagaaaggtggaagccacagttccttttatgacctaacctcagaagtcacacagtatcatttctgcttcatgctgtttgtcaaaaaggtactgcatcgtctttccttgtctgcaagggcaaggtcaactcatgacatccatggccacatttcagcccacaggaagaggaaagggggcaagctttccttacgtggtttttgaaaggactgacctggaagtagtagatgtcatttacattcttatctcattggccagagcaggtcaaaaggccacaaggccacagtgaactgcagcgaaggctgggaaatgtagtctttcactgggtaagctgtgtgcccagttcaaacttgggagatactatttttacaggaaaaggggctgggtgcagtggttcatacctgtaatttcaacactttaggctatggtgggaggatcacttgaggctgggagcttgcaaccagcctgggtgacatagtgagaccccttctctacaaaaaataaaagaaaattagccaggtggggtggcgggcacctgtagtcccagctactcgggaggctgaggcaggaggatcctctgagctcagctgattgaggctgcaatgagccatgatcccaccactgcactccagcctggcagcagacagcaagatcctgactgtaaaataaataaatagaaaaagtaaaagagaaggagaatatatatggaagtttagtggatagtctttgccacactcactgaatgaatgaatgaaccaataacggatcgagaaattgatctatggatgaccagctgatggtcaagatcagctgaaaagtggctaggtgcggtggctcacacctgtaatcccaccactttggggaggccaagatgggcggatcacctgaggtcaggagttcaagagcagcctggccaacatggtgaaaccctgtctctaccaaaaatataaaaaattagctgggcgtggtggcacgtgcctttaatcccagctactcgggagtctgagacaggagaatcgctcgaacctgggaggtggaggttgcagtgagctgagatggcaccactgcgctccagcctgagtgacagagcaagactccaagactccatctaaaaaaaaaaaaaaaaaaagggtcggctgaaaggttgacaggtgagtgattgacaaatcctgggttgatgcattgcctgaaatgcagcaggtaaccgactggctggtgactgagtgtctggacagagggcagcctcctccgtctcccctatctgacgagctcctccctatggctctctctgctccagttctccaatatccccttcttcatcttcgggccactgatgatgctcctgatgcacccgtatgcccagaagcgctcccgctacatttacgttgtctgggtcctcttcatgatcataggtagggaggtgtggttcaggtctgtgacagtcgggaggcagtgggggtttaggaggtggcggaccccactgaccgcctgcccttgccgctgcaggcctgttctccatgtatttccacatgacgctcagcttcctgggccagctgctggacgagatcgccatcctgtggctcctgggcagtggctatagcatatggatgccccgctgctatttcccctccttccttggggggaacaggtgggtcaggggctggccatctggacagggtggggtctgagtcttcagttgactctacatgagctcacctgagtcccctgggtccccacccttgaccctctttggggcccttggaattcctcccctgaccacttcgggttttctcctgaccctgcctgactcacttgggcttctggagacccctcccctgagcttacctggtttcttggaatccctcccttgatcctactttgataacctgggacttcctccagaatctgttgcagccaacaggagttccaggacctcatgtctacacttacctgggcctgagggactcctccccgagcctctcacctggcgttcctggcatctttcatctgatctgcttagaccccctgggtccctctcttgatctaattgatccccactcccacccttgacccctgtgaaataatctccttctccttctacttttccacctcctcctccttctcctcctccttctcctcctccttctccttcttcttcttcttctcctcctcctccttctccttctccttcttcttctccgcctcctccttcttctttttcttcctcctcctcctcctccttcttcttcctttttgagacagagtctcgctctgtcacccacactggagtgcagtggtgcgatctcggctcactgcagcctctgccttcagggttcaagtgatcctcctgcctcagcctcccgagtagctgggattacaggcacctgccaccacacccggctaatttttgtatttttagtagagacggtttcaccatgttggccaggctggtctcgatctcctgatctcaagtgatccacctgccttggcctcccaaagtgctgggattacaggcaagtgaaattctcttctaacccggcttaacccacctgagccctccaggacccccccagcccaccctattgacctctgggacccctgtcatctttcctttatccctactgggtcctggagagccactgtctgacatctcttaaattcacccggacccagggatccctcttctcagcccagctgggatcccctgaactccttgcctgacctcacctgggccctggaaaccatcacgctctcccaggctccctgggaccctcttctcatcctactgagtcctccctgggatccccctttagacgctgcctgggctcacctgggctccctgagactttctgctgagtccacttgggagcctcaggaccttcttcttctccttctccttcttctttttttttttttttttagatgaagtctcgctgtgtcccccaggctggagtgcagtggcgcaatcttagcttgctgcaacctccaattcccaggctcaagcgatccctgcctcagcctctttagtagctgagattacaggcacatgccaccacatccagctagttttttgtatttttggtagagacagggttttgccatgttgcccaggctggtctcgaactcctgagctcaagcaatcctcccacctcagcctcccaaattgctgggattacagtcacgagccaccgtgccgggctaggaccctttttcttgttgtcgtttttgagacagaatctccctctgtcacccaggctggagtgccgtggcgtgatcttggcccactgaaacctctgcctcctggttcaagcaattctcgtgcctcagcctcctgagtagctgggattacaggcatctgctaccacacctggctaaattttgtatttttagcagaaatgggatttcaccagggccaggcgcagtgactcatgccggtaatcctagcactttgggaggccgaggcgggcggatcacgaggtcaggagattgagaccatcctggctaacatggtgaaaccccgtctctagtaaaaatataaaaaatgagccgggcgtggtggcgggcgcctgtagtcccagctacttgggaggctgaggcaggagaatggcgtgaacctgggaggtggagcttgcagcgagcccagatcgcactgctgcactccagcctgggcgacagagcgagactccgtctcaaaaaaaaaagaaatggggtttcaccatgttgaccaggctggtctcaaactcctgacctcaggtgatccgcccacctcagcctcccaaggtgctgggattacagacatgagccaccgtgccctgcctggctaggacccttttctgagcctatctgggctccccagaatcctgtccttttctcacccacctgggccacgggatctccaagtgaccatgcctacaatcccaggacctcccttcccgcctacagctgagccccttcctccccaggtcccagttcatccgcctggtcttcatcaccactgtggtcagcacccttctgtccttcctgcggcccacggtcaacgcctacgccctcaacagcattgccctgcacattctctacatcgtgtgccaggagtacaggaagtgagtgaaggctgcaggtgcctgggcaggaggctcccatccccctcctagcacccctgactccaggctcgcggaggggacgtcccttctccaagatcacccactaacaagtagcagggccaggatttgaacctgactgactgcagagtttgtccttattattattttttttcttgagacggatcctcgctctgttgcccaggctggagtgcaggggcgtgatcttggctcactgcaacctccacctcccaggctcaagcaatcctcccactccagcctcccaagtagctgggactagaggcgtatgccatcatgccaggataatttttgtatttttctttgtagaaacagggtttcgtcatgttgcccaatctggtcttgaactcctgggctcaagcgatccacccacctcagcctcccaaagtgctgggattacaggtgtgagccactgcatccaccctacattatctttattttatttatttatttatttatttttgagacagagtctctctctgtcttccaggctggagtgcagtggtgtaatctcagctcactgcaaactctgcctcccgggttcaaggattctcctgcctcagcctcccgagcagctgggagtacaggtgtatgccaccatgctcggctaatttttgtatttttagtagagacggagtttcgtcatgttggccaggctggtctcaaactcctgacctcaggtgatctgcccacctcggcctcccaaagtgttgagattacaggcgtgagccactgtgcccagcagagtttgtcctttttatgatgaaacccagaaacagacatgcaagcagagaaaatagccccacaaacctccccacgcccactaaccagccacaacaaccacccacattttgtcaatctgttacatatttctcccagatttcatacaatttcacccctaatttttttttataatttaactcccctgattacaaaaaatatattattcttgctgggcatgatggctcatgcctgtaatcccagcactttgagagcttgaggcacacatacctctaccccaaaacatacaagcaccaaagggcttgttggttaagaataaatactatgcagtcagaaaaacttggtttagatcccagctctgccacttaccagctgtgtaaccatggggtggggtggggcatagtgcaatccctgtgcctcagtttactcctctacaaagtccttgtgaggactgagttaatatcttttttttttttttttttgagacggagtctcactcttgtcgcccaggctggagtgcaatggtgcgatcccggctcactgcaatctccacctcctgggttcaagcgactcttgtgccttagcctcctgagtagctgaaattacagacacacgccaccacgcccggctaatttttgtatttttagtagagacagagtttcgccatgttggccaggctggtctcgaactcctaacctcagatgatctgcccgcctcggcctcccaaagtgctgggattacaggcttgagccgccgcgcccagctgactgagttaatattcgaaggtgtttaatttattattgttacttgtttttatttatttatttatttatttaagatggagtctcactctgtcacccaggctggcgtgcagtggcgcaatcccggctcattgcaacctccgcctcttgggttcaagtggctcagcctcccaagtagctgggattacaggcggccaccaccatggccggctaattttttttttgtatttttagtagagtcagagtttcaccatgttggccaagctggtctcaaacttctggcctgaagtgattcacctgcctcagcctcccagacttctgggattacaggtgtgagccatcacgcccggcctattattgttttttaagacagggtcttactctgtcacccaggccggagtgcagcggcgcaatcacggctcactgcagccttgcactcctgggctcaaatgatcctcttgcctcagcctcccgagtaaccggaactgcaggcatgcaccatcatgcctggctaattttaacttttttttttttttttagagatggggtcttgctattttgcccaggctggtcttaaactccagggctcaagcgatcctcccaacctcagcctcccaaagtgctgggattacaggcatgagctactatgcctggcttgaaggacatttggaactgcacctgttgtgctggaaatgctgtgttagttctaagcacgagattgggccccctctgcttgcaccctcaattcctgctctttcccttctcccaacctctgagcctcatcactgtggaaggaggaatttcccatcagccccatcaggtgctgctctccgagccagcccctggtccccctctcccctctctaggaccagcaataaggagcttcggcacctgattgaggtctccgtggttttatgggctgttgctctgaccagctggatcagtgaccgtctgctttgcagcttctggcagaggattcatttcttctatctgcacagcatctggtaagcacatgctctgaggctgtggggggcccagagtcagagaatcttagatgccaaagctcggagtaggcacctgggggctggggttggagaagcagagagaggagagccagacactgggacctggcggtaggggaaggctgcagtcacggggccagacccagaaggctcccctggatggatggtcaagagtcatgagaagtaaaaagagggccggcgtgaggctgtgggtatcttgtgccctcgccaccttcgccctgcactccacaggcatgtgctcatcagcatcaccttcccttatggcatggtcaccatggccttggtggatgccaactatgagatgccaggtgaaaccctcaaagtccgctactggcctcgggacagttggcccgtggggctgccctacgtggaaatccggggtgatgacaaggactgctgagacctgccagcctcttgactatccaaccacccaacaacttgcctgtgtcttgagaagatagccccggtcaggacttgcacctgcgggacactcgtggttccttcctctgtttccccttccgtgtcctccttgtcctgcgctgccctgccttgaggcagatgatggactttgtgacatctctgagcagcagcctggtgactgtggggggctgtctcgtgcatctcccctccatgaccccccccatcctctttcatttcctcctctgtgtccacagcctcccagtgaccattgtcacatgagctggtgggactgtgtcaccaggtactggggtgactgaaggatgtggcatctaaatattagcttctaggctgggaacggtggctcacgcctataatcccagcactttgggaggccgaggtgggtggatcacctgaggtcagaagttcaagactagcctggccaacatggcaaaaccccgcctctactaaaaatacaaaaattagccgggcgtggtggtgcatgcctgtaatctcagctacttgggaggctgaggcaggagaatcgcttgaacccaggaggcagaggttgcagtgagctgagatcatgccattgcactccagcctgggcaacaagagagagactccatctcaaaaaataataaataaataaataaatattagcttctaaatattggtggtcactaccagactccctcatctgtctctggccatggcaatgtccctggctcttgggggacaccccagagaatgaacatgacttccaggcacctcattctacatccacatgtgcatgtggagatgttacatgaagacccactcacctcctcccatggacttgtgaggtcctcaggttcacagctgagaacagcagagtcccagactgggcagtctgggtgctttgggggcatgtggacatgagagaggagcgagggtagccaggatagtctctaaagcagtggtggagtggtggggaaggtctgttttcatggtggttaagagcacggggcctggagtcaggcagacctaagttagaattcctgctccaccattttctagttgtacaatcttggggaagtgatttttcctgcctcagaagctcaaggacattgtctgtaaaacagaaataatattccttgtcttgtgggggtttttgtgtggttaaaacaaatgaatgtgtgtgaagtccttagcatagagtttgacaaacatccagccacccactcatcctttaattcatctgccccataatttattcatccattcattcattcatctaccattaatttattcattcatccacccaccctttaattcatctacccattaatttattcctctatccattcatcatccacccatcctttgattcatccatccattaatttatccatctaaccatccacctacccatcctttaatttatctacccattagtttatccatctacctatcttttaattcatccacacattaatttctccatccttccatccacccgttaattcacccatccaatactttatccattcatccagccaccactaatttatccatccatccatccattcatctattgaactctccattgaactatcatctattcatcctttaatttgcccatccagtaatttatccaacgattccgcctttcttctattatctatcctttaatccacctattcattcattaatgtatctatccatccattgaatcatccatcaaactatccattcatctatccatccattatcaattattcatcatcatccatcatttattatcctttcattcatccacctattaagccatttatccattaatttacccaattatttatccatcaccttaccctacatccatccatccatccatccattcgcccacatttagccattcgtttgtccattcatttatccatccaaatcattcaaccatcctttcattcatctacttttcaactactcattcattcacccattcaacacacatacatatattgggctcctgctatatatcagatgctagcctctggggatccaagacaacaaagacatacaacgtccttgccctaatgaaggatatagatattaaacaaataaaaacacacacacacaaagcacttccagccattgataggcgctaaaaaagataaaatacaataatattctggaagatgatggttctgggagcagcactatcacatgggtggtccagggagtgcactttgcagttgagcccttaatgacaagagggaaccaacgataccaaaagccagggcaagtccattctggacagagggaatggctgtgtgaaacccctgggatgggaatgagctttcaagctggagcaacagcaaagacttttggccaggctcagtgtctcatgcctgtaatcccaacattttgggaggctgaggtgggaggattgcttgagcccaggagttcaagaccagcatgagcaacacagcaaaacctcctctctatgaaaaatttaaaaaaaattagctgggtgtggtggcatgagcctgtagtcccagctacttgggaggctgaggtggaggatggcttgagtccagaaagtggaggttgtgccactgcattccagcctagacacatagtaagaggttcttatctggggtccctggatgggtttcagcgtccacagaccacttgacattgtgtgcaaaagatgggtgtttgggcatacaatctaggtgcctggagtgcatcactttagataaatgagaatactctcattttatagatgtggctcagagagggcaagtgacttgcctaaggccacacatcgtggacttgaacccagtccgtccttttccaaagctctttgcgctacagtgagacagtagtgggactgaacttggattcctggtcatctgcttccgagtccttcttcctttcttgttctagaagccagaggtttttcacttgtggctccaggatggatcatggtggtaggaagaggtggggttgaggatgtctgtaaacttgtaaaatcatctgcaaaatgttgtgtgtcttggtgtatttgggggagaggagctgtgattccgtgacagcccctgaagaggtgtttgaccacccaaagagttgagaacctcagttaaaaatcttcttggggagggtggctgagcacagtggctcacgcctgtaatcccagcaccttgggaggctgaggtgggcagatcgcgaggtcagcagatggagaccatcctggctaacgtggtgaaaccccatctctactaaaaatataaaaaatgaggcaggcatggtggccggcgcctgtagttccagctactcaggaggctgaggcaggggaatggcgtgaacctgggaggcagagcttgcagtgagccgagatcaccccactgcactccagcctgggcgatacagcgagactgcgtctcaaaaaaaaaaaaaaattagccaggcttggtggcacgtgcctgtagtcccagctactcgggaggctgaggcaggagaactgcttgaacccgggagacagaggttgcagtgagccaagattgcgccactgcactccagcctgggcaacagagcaagactctgtctcaaaaaaaaaaaaaaaaaagaatcaacaaacaaaatcttctgagggaggaggatagagaagcgcctgcctcctcccctgaccccgtggctcttcctcttctttgccagcttatgtggcccgagtgcaaaatcatttaaaaaaaaatcccgctctatccccagtatctgtcctctggctcctgctggcccctcctcacagcctcctcttggggcatgaacgtagccgatgagcaagaggcctgggtaacctctgcctcccggttcaagcgagtcttgtgcctcagcctcctgagtagctgggattacaggcacgtgccaccacgcctggctaatttttgtattttcagtagagacggggtttcaccatattggccagggtggtctcgaactcctgacctcatgatctgcccacctcggcctcccaatccagtctgtaactctttttttttttttttttttgagacgcaatctcactttgtagcccaggctggagtgcagtggcgcgatctcggttcactgcaagctccacctcccgggttcacgctattctcctgcctcagcctcctatgtagctgggactacaggcgcccgccaccacgcccgactaattttttgtatttttagtagagacaggtttcaccgtgttagccagatggtctcgatctactgacctagtgatccacctgcctcggcctcccaaagtgctgggattacaggcgtgagccaccgtgcccagcctccagtctataattctaacaagctacatgacccttgcacatcctagtctccatcagggaaggtctcttggtgacaaaggacaaaatattcaaccccaactgcctgaaatcacaaatggacaatcagcatatatgctttttttttttttgagacaggatctctgttgcctagactggagtgcagtggtgcgatcttggctcactgcaacctccacctcctgggttcaagcaattctcatgcctcagcccccgaagcagctgggatgacaggcacccaccaccatacccgggtaatttttgtatttttaatagagacagggttttaccatgttggccaggctggttttgaactcctgacctcaggtgatccgcttaatcaggaaggtctgttggtgaaaaaggacaaaatattcaaccccaactgactgaaatcacaaacggacaatcagcaatatgtacttttgtttgtttatttgagacagagtcttgctctgtcacccaggctggagtgcagtggcacaatctcggctcactgcaacctctaccttctgggttcaaacaattcttctgcctcagcctcctaagtagctgggactgcaggtgcatgcaagcatgccagctaatttttgtatttttagtagaggtggggtttaaccatgttgcccaggctgatctggaactcctgagctcaggtgatctgcccacctcagcctcccaaagtgctgggattataggcgtgagccactgtgcctggccagcatatctacttttgaagttcagccccaggctgcagacctggctgggtccaggcttcaaatgatgtcaccagggccaggctctcttcgtccctctggctggcttcatgggtgggagcggccaccaggagggctaggctgccttctttccaagtttaaaagtgaactcaaaagctccaagcacaggctgggcttggtggctcatgcctgtaatcccagtgttttgggagaccgaggtgagaggattttttgagaccagcctgggcaacatagcgagaacctgtctctacaaacaaattaagaattagccaagcatggtggtgtacacctgtggtcttagctacttgggaggctgaggcaggaggatcgcttcatgagccagggaggttgaggctgcagtgagccatgatcacaccactgcactccagcctgagtgacagagtgagaccctgtctgaaaaaaaaaaaaaaaaaaaagaaaaagaaaaaagggctggagcagtggctcacgcttgtaatcctagcactttgaaaggccaaggtgagtagattgcctgagataaggagttcgagaccagcctgggcaacatagtgaaaccccatctctactaaaatacaaaaaattagctgggcatggtgtcacacacttgtgattccagctactcgggagactagggcagaagaatcgcttgaacccaattggcggaggttgcagtaagctgagattgtaccactgcactccaaactggacgacagagtgaaactgtctcaaaaaaaaaaaatgctgggtgcagtggcttatgcctataatcccagcactttgggaggacaaagcgggcagaccacctgaggtcaagagttcgaggccagtctggccaacatggtgaaaccctgtctccactaaaaatacaaaaaattagccgggtgtgatggcacacacttgtaatcccagctattcaggaggctgaggcaggagaatcacttgaacccaggaggcagaggttgcagtgagctgagatcacgccactgcattccagcctgggtgacaagagcaaaactctgtcaaaataataataataataatagcagctccaggcacacatgaagatgctcaatatcattgttgttagggaaatgaaaatcactggtcaggcacagtggctcacaactgtattcaccacactttgggaggtcaaggttggcggatcacctgaggttaggagtgcaaaaccagcctggccaacatggtgaaaccccatctctactaagaatacaaagtttagccgggcatggtggtgggcacctgtaatcccagctactcgggaggctgaggcaggagaatcgcttgaacccaggaggcggaggttgcagtgagccgagatcacaccactgcactccagactgggcgacagagccagactccatctcaaaaaaatatatacttatgtatgtgtattgcaacaggtggctgtgtgtgtacttttgtggcaggcagcaaactgggagcttacaggaaacaggttggaggccaaaaggaattccaaaaagtacccaaaagagggctggaccgtctactaggcgaaataaaaagggaacactcaacgttgttcccggggtgcaaataaagtgaaccactagagggcggtagagacttaacgtattaacagtaacagttccgttatggaccaaaagcaagaccagaacatccaaaatgttactttctttggagttcaagaccagcctgggcaacatagggagaccctatctctacaaaaaaaattttaaaaattagctggatgtggtggcacatgcctgtggtcccagctactggggaggctgaggtgggaggattgcttgagcccgggaggttgaggctgcagtgagctatgattgcgccattgcactctagcctgggtgactagatttaaaaatctaggctgggcgtggtggctcacgcctgtaatcccagcactttgggaggccgaggcgggaggatcacgaggtcaggagatcaagaccattctggctaacacggtgaaaccccatctctactaaaaatacaaaaaattagctgggcgtagtggcgggcgcctgtagttccagctactcgggaagctgaggcaagacaatggcgtgaacctgggaggtggagcttgcagtgagccgagatcgcgccactgcactccagcctgggtgacagagcgagactccgtctcaaaaaaaaaaaaaaatctaaaaagttgaagggctacaagtacagtttgtcacatgcatatattgcataatggtggtcttggcttttcgtgtatccatcacctgaataatatactttgtatctgttatacaatttttcatcactttctctccttccatccaccccccccgcccacccaatgtctatcattctacactctacacccatgtgtacacattatttagataccacttataagtgagaatgtatagcatttgactttctttcatccatctccagaactttctcatcttcccagcatgaaactgtccccatgaaacactcactccccagcaccctcccctgctcctggcatccaccagcctattttctgtttctatgaatctgttgacttgagggacctctgttgactcctaggagaggagtggaatcacacaggatttgtccttttgtgtctggcttatttcacttagcataatgtcttcagggttcatagatacaaggtcttgctctattacccagcctggagtgcagtggtgccattgcagaattcttgggatggtgtcacttttctggctgtaaacctctgtggctggtggcatctttgcctgagttttgctcaggcccactgggctcattctgcccacttgacctggcaggctacactcggctcttgctaccagcctggatcccacacctgccaagggtgtgccaggtgtggagtggcaaggggtgtgtgttcaagcaagcatggggtctagcccctgtgcacagtcagacacaccggctgctgcagcagggtgagcagctccaggtgccggcatgggcactggctctctgcaaggctgcggcttggccaggtgcaccacaagtagcgtccatggctgccaccagggaccatggtggagcccagaagcttnnnnnnnnnnnnnnnnnnnnnnnnnnnnnnnnnnnnnnnnnnnnnnnnnnnnnnnnnnnnnnnnnnnnnnnnnnnnnnnnnnnnnnnnnnnnnnnnnnnnnnnnnnnnnnnnnnnnnnnnnnnnnnnnnnnnnnnnnnnnnnnnnnnnnnnnnnnn

SEQ ID NO: 2430 - protein, 291 aa, Homo sapiens
MPSIFAYQSSEVDWCESNFQYSELVAEFYNTFSNIPFFIFGPLMMLLMHPYAQKRSRYIYVVWVLFMIIGLFSMYFHMTLSFLGQLLDEIAILWLLGSGYSIWMPRCYFPSFLGGNRSQFIRLVFITTVVSTLLSFLRPTVNAYALNSIALHILYIVCQEYRKTSNKELRHLIEVSVVLWAVALTSWISDRLLCSFWQRIHFFYLHSIWHVLISITFPYGMVTMALVDANYEMPGETLKVRYWPRDSWPVGLPYVEIRVRHTGCCSRVSSSRCRHGHWLSARLRLGQVHHK
